(19) United States
(12) Patent Application Publication
(10) Pub. No.: US 2026/0199414 A1
(43) Pub. Date: Jul. 16, 2026

(54) RECOMBINANT VACCINIA VIRUS ENCODING ONE OR MORE NATURAL KILLER CELL AND T LYMPHOCYTE INHIBITORS

(71) Applicant: TURNSTONE BIOLOGICS CORP., La Jolla, CA (US)

(72) Inventors: Sebastien Delpeut, Ottawa (CA); David Stojdl, Ottawa (CA)

(21) Appl. No.: 19/139,263

(22) PCT Filed: Dec. 15, 2023
(86) PCT No.: PCT/US2023/084453

§ 371 Date: Jun. 13, 2025

Related U.S. Application Data
(60) Provisional application No. 63/433,414, filed on Dec. 16, 2022.
(60) Provisional application No. 63/433,743, filed on Dec. 19, 2022.

(51) Int. Cl. A61K 35/76; A61K 35/17; A61K 40/11; A61K 40/31; A61K 45/06; A61P 35/00; C07K 14/54; C07K 16/28; C12N 7/00; C12N 15/11

(52) U.S. Cl. CPC A61K 35/76; A61K 35/17; A61K 40/11; A61K 40/31; A61K 45/06; A61P 35/00; C07K 14/5434; C07K 16/2818; C12N 7/00; C12N 15/11; C12N 2710/24121; C12N 2710/24132; C12N 2830/34

(57) ABSTRACT

Various embodiments of the invention provide recombinant oncolytic viruses engineered to express human cytomegalovirus (HCMV) glycoprotein UL40 and/or Kaposi's sarcoma associated herpesvirus (KSHV) K5 protein, and methods and uses of the same for treating cancer. Also provided are combination therapies involving a T lymphocyte infiltrating (TIL) cell therapy and a provided recombinant oncolytic virus for treating a cancer, including solid tumors.

### CROSS-REFERENCE TO RELATED APPLICATIONS

[0001] This application claims priority to U.S. Provisional Patent Application No. 63/433,414, filed Dec. 16, 2022, entitled “RECOMBINANT VACCINIA VIRUS ENCODING ONE OR MORE NATURAL KILLER CELL AND T LYMPHOCYTE INHIBITORS,” and to U.S. Provisional Patent Application No. 63/433,743, filed Dec. 19, 2022, entitled “RECOMBINANT VACCINIA VIRUS ENCODING ONE OR MORE NATURAL KILLER CELL AND T LYMPHOCYTE INHIBITORS,” which are herein incorporated by reference in their entirety for all purposes.

### INCORPORATION BY REFERENCE OF SEQUENCE LISTING

[0002] The present application is being filed along with a Sequence Listing in electronic format. The Sequence Listing is provided as a file entitled 220612001440SeqList.xml, created Dec. 15, 2023, which is 724,548 bytes in size. The information in the electronic format of the Sequence Listing is herein incorporated by reference in its entirety.

### FIELD OF THE INVENTION

[0003] Embodiments of the invention relate to recombinant oncolytic viruses engineered to express human cytomegalovirus (HCMV) glycoproteins UL40 and/or Kaposi's sarcoma associated herpesvirus (KSHV) protein. More specifically embodiments of the invention relate to recombinant oncolytic viruses engineered to express human cytomegalovirus (HCMV) glycoprotein UL40 and/or Kaposi's sarcoma associated herpesvirus (KSHV) K5 protein, and methods and uses of the same for treating cancer. Embodiments also relate to combination therapies involving a T lymphocyte infiltrating (TIL) cell therapy and a provided recombinant oncolytic virus expressing one or both of HCMV glycoprotein UL40 and/or KSHV K5 protein for treating cancer, including solid tumors.

### BACKGROUND

[0004] Solid tumors remain a leading cancer affecting millions of new patients each year. Although various strategies are available for treating cancers, including solid tumors, there are still obstacles with existing approaches. Targeted oncology has demonstrated some progress but with few cures. For instance, use of oncolytic viruses show promise but have limitations. One such limitation is immune clearance of the oncolytic viruses, where the patient's immune system clears the virus before the oncolytic effects are realized. Thus, there is a need for improved oncolytic viruses and methods of using, including for treating solid tumors. Provided are embodiments that meet such needs.

### SUMMARY OF THE INVENTION

[0005] Various embodiments of the invention provide a nucleic acid comprising a recombinant Orthopoxvirus genome and one or more transgenes comprising (a) a nucleotide sequence encoding UL40 and/or (b) a nucleotide sequence encoding K5.

[0006] In some embodiments, the recombinant Orthopoxvirus genome is derived from a Vaccinia virus genome. In some embodiments, the Vaccinia virus genome is derived from a genome of a Copenhagen strain of Vaccinia virus.

[0007] In some of any embodiment the Orthopoxvirus genome comprises: (a) deletions in one or more of the following genes: C2L, C1L, N1L, N2L, M1L, M2L, K1L, K2L, K3L, K4L, K5L, K6L, K7R, F1L, F2L, F3L, B14R, B15R, B16R, B17L, B18R, B19R, and B20R; (b) deletions in one or more of the following genes in the 3′ inverted terminal repeat (ITR): B21R, B22R, B23R, B24R, B25R, B26R, B27R, B28R, and B29R; and/or (c) deletion in the B8R gene. In some of any embodiments, the Orthopoxvirus genome comprises: (a) deletions in the following genes: C2L, C1L, N1L, N2L, M1L, M2L, K1L, K2L, K3L, K4L, K5L, K6L, K7R, F1L, F2L, F3L, B14R, B15R, B16R, B17L, B18R, B19R and B20R; (b) deletions in the following genes in the 3′ inverted terminal repeat (ITR): B21R, B22R, B23R, B24R, B25R, B26R, B27R, B28R and B29R; and (c) deletion in the B8R gene. In some of any embodiments, the deletions in the C2L, F3L, B14R, and B29R vaccinia genes are partial deletions.

[0008] In some of any embodiments, the Orthopoxvirus genome has at least 95% sequence identity to SEQ ID NO 15 In some of any embodiments, the Orthopoxvirus genome has the sequence set forth in SEQ ID NO 15.

[0009] In some of any embodiments, the Orthopoxvirus genome comprises a nucleotide sequence encoding UL40.

[0010] In some of any embodiments, the Orthopoxvirus genome comprises a nucleotide sequence encoding K5.

[0011] In some of any embodiments, the Orthopoxvirus genome comprises (a) a nucleotide sequence encoding UL40 and (b) a nucleotide sequence encoding K5.

[0012] In some of any embodiments, the nucleotide sequence encoding UL40 encodes an amino acid sequence with at least 95% sequence identity to SEQ ID NO 3. In some of any embodiments, the nucleotide sequence encoding UL40 encodes the amino acid sequence set forth in SEQ ID NO 3.

[0013] In some of any embodiments, the nucleotide sequence encoding UL40 comprises a sequence with at least 95% sequence identity to SEQ ID NO 1. In some of any embodiments, the nucleotide sequence encoding UL40 comprises the sequence set forth in SEQ ID NO 1.

[0014] In some of any embodiments, the nucleotide sequence encoding UL40 is operably linked to a vaccinia virus early/late promoter.

[0015] In some of any embodiments, the nucleotide sequence encoding K5 encodes an amino acid sequence with at least 95% sequence identity to SEQ ID NO 6. In some of any embodiments, the nucleotide sequence encoding K5 encodes the amino acid sequence set forth in SEQ ID NO 6.

[0016] In some of any embodiments, the nucleotide sequence encoding K5 comprises a sequence with at least 95% sequence identity to SEQ ID NO 2. In some of any embodiments, the nucleotide sequence encoding K5 comprises the sequence set forth in SEQ ID NO 2.

[0017] In some of any embodiments, the nucleotide sequence encoding K5 is operably linked to a vaccinia virus early/late promoter.

[0018] In some of any embodiments, the one or more transgenes comprises at least one further transgene comprising a nucleotide sequence encoding an immunomodulatory protein selected from the group consisting of a checkpoint inhibitor, an interleukin, a cytokine and an NK cell and/or T cell inhibitor.

[0019] In some embodiments, the immunomodulatory protein is FMS-like tyrosine kinase 3 ligand (FLT3L), an antibody that specifically binds CTLA-4, or an Interleukin 12 (IL-12) polypeptide, optionally wherein the IL-12 polypeptide is a membrane-bound IL-12.

[0020] In some of any embodiments, the nucleotide sequence encoding the at least one further transgene is operably linked to a vaccinia virus early/late promoter.

[0021] In some of any embodiments, the vaccinia virus early/late promoter is selected from one or more of H5R, P7.5, and E3L, or is selected from SEQ ID NO: 4, SEQ ID NO: 5, and SEQ ID NO:14.

[0022] In some of any embodiments, the one or more transgenes is inserted into locus 5p of the recombinant Orthopoxvirus genome between the genes C2L and F3L.

[0023] In some of any embodiments, the one or more transgenes is inserted into locus 3p of the recombinant Orthopoxvirus genome between the genes B14R and B29R.

[0024] In some of any embodiments, the one or more transgenes are in the same orientation as endogenous Orthopoxvirus genes within the recombinant Orthopoxvirus genome.

[0025] In some of any embodiments, expression of UL40 increases HLA-E surface expression in a host cell infected by a recombinant Orthopoxvirus comprising the nucleic acid. In some of any embodiments, expression of K5 decreases HLA-ABC surface expression on a host cell infected by a recombinant Orthopoxvirus comprising the nucleic acid. In some of any embodiments, the expression of K5 decreases ICAM-1 surface expression on a host cell infected by a recombinant Orthopoxvirus comprising the nucleic acid.

[0026] In some of any embodiments, host cells infected by a recombinant Orthopoxvirus comprising the nucleic acid are killed by lymphocytes at a reduced rate in comparison to cells infected with a reference recombinant Orthopoxvirus that has a similar genome but does not comprise a nucleotide sequence encoding either UL40 or K5.

[0027] In some of any embodiments, host cells infected by a recombinant Orthopoxvirus comprising the nucleic acid are killed by NK cells at a reduced rate in comparison to cells infected with a recombinant Orthopoxvirus that has a similar genome but does not comprise a nucleotide sequence encoding either UL40 or K5.

[0028] In some of any embodiments, host cells infected by a recombinant Orthopoxvirus comprising the nucleic acid are killed by T cells at a reduced rate in comparison to cells infected with a recombinant Orthopoxvirus that has a similar genome but does not comprise a nucleotide sequence encoding either UL40 or K5.

[0029] Provided herein is a recombinant Orthopoxvirus encoded by the nucleic acid of some of any embodiments. Provided herein is a pharmaceutical composition comprising the recombinant Orthopoxvirus of some embodiments and a physiologically acceptable carrier.

[0030] Provided herein is a method of treating cancer comprising administering the recombinant Orthopoxvirus of some embodiments to a subject Provided herein is a method of treating cancer comprising administering the pharmaceutical composition of some embodiments to a subject In some of any embodiments, the subject is human.

[0031] In some of any embodiments, the method further comprising administering a second therapeutic agent for the treatment of cancer. In some embodiments, the second therapeutic agent is administered before, concurrently with or after administering the pharmaceutical composition or recombinant Orthopoxvirus.

[0032] In various embodiments the second therapeutic agent may correspond to a cancer therapy and/or agents in used various cancer therapies. For example, in some of any embodiments, the second therapeutic agent is an autologous tumor infiltrating lymphocyte (TIL) therapy. In some embodiments, the pharmaceutical composition or recombinant Orthopoxvirus is administered to the subject prior to harvesting the TILs from a tumor from the subject for producing the autologous TIL therapy.

[0033] In some of any embodiments, the second therapeutic agent is CAR T cell therapy.

[0034] In some of any embodiments, the second therapeutic agent is a checkpoint blockade immunotherapy. In these and related embodiments, the checkpoint blockade immunotherapy is a PD1 and/or a PD-L1 inhibitor.

[0035] In some of any embodiments, the second therapeutic agent is an immunomodulatory agent. In these and related embodiments, the immunomodulatory agent may correspond to one or more of a CD47 inhibitor or NKG2A inhibitor as well as their analogues.

### BRIEF DESCRIPTION OF THE DRAWINGS

[0036] FIG. 1A-1C show uninfected cells and cells infected with parental SKV, SKV-K5, SKV-UL40, or SKV-UL40_K5 with HLA-E quantifying surface expression of HLA-E (FIG. 1A), ICAM-1 (FIG. 1B), and HLA-ABC (FIG. 1C).

[0037] FIG. 2A illustrates the ratio of cells obtained by an isolation of NK cells. FIG. 2B depicts an exemplary killing assay done with the isolated NK cells where the NK cells were incubated with HeLa cells that were uninfected or infected with parental SKV, SKV-K5, SKV-UL40, or SKV-UL40_K5 and NK cell mediated killing of the HeLa cells was measured.

[0038] FIG. 3A and FIG. 3B illustrate an exemplary experiment where MeWo cells were infected with parental SKV, SKV-K5, SKV-UL40, or SKV-UL40_K5 and incubated both with and without IFNγ before surface expression of HLA-ABC was measured (FIG. 3A), along with surface expression of HLA-E (FIG. 3B). Infected cells were then incubated with T cells to quantify T cell mediated killing of infected cells as shown in FIG. 3C.

### DETAILED DESCRIPTION OF THE INVENTION

[0039] Various embodiments of the invention provide recombinant oncolytic viruses and methods and uses involving such recombinant oncolytic viruses. In some embodiments, the genome of the recombinant oncolytic virus contains one or more transgenes. In some embodiments, recombinant oncolytic virus is encoded by a nucleic acid encoding a recombinant Orthopoxvirus genome containing the one or more transgenes. In particular embodiments, the one or more transgenes includes human cytomegalovirus (HCMV) glycoprotein UL40 and/or Kaposi's sarcoma associated herpesvirus (KSHV) K5 protein. In some embodiments the one or more transgenes are able to reduce or inhibit NK and/or T cell mediated killing of recombinant oncolytic virus infected cells. Also provided herein are methods of utilizing the recombinant oncolytic virus for treatment of cancer. Also provided are methods of utilizing the recombinant oncolytic virus in conjunction with T cell therapy, such as T lymphocyte infiltrating (TIL) cell therapy or a chimeric antigen receptor (CAR) T cell therapy.

[0040] Numerous poxvirus-based oncolytic platforms have entered clinical trials over the past decade including Orthopox viruses such as Vaccinia virus (VACV) (Chaurasiya et al. (2018) Biomed. 9:419), however, the main challenge of oncolytic virotherapy remains unsolved with premature viral clearance mediated by both innate (NK cell mediated) and adaptive (T cell mediated) antiviral immune responses.

[0041] Although oncolytic viruses provide direct cancer lysis to stimulate systemic immune response, phenotyping of CD8⁺ TILs indicates that tumor-infiltrating lymphocytes can not only be specific for tumor antigen but also recognize viral epitopes (Simoni et al. (2018) Nature. 557:575-579). In addition, immunodominant VACV-specific cytotoxic T lymphocyte (CTL) responses reduce the effectiveness of poxvirus infection in recombinant vaccination strategies (Smith et al. (2005) J Immunol. 175:8431-8437 and Harrington et al. (2002) J Virol. 76:3329-3337) which is partially attributed to the presence of long-lived VACV-specific T cell responses resulting from the worldwide immunization campaign against smallpox (Demkowic et al. (1993) J Virol. 67:1538-1544 and Demkowicz et al. (1996) J Virol. 70:2627-2631). MHC-I molecules such as HLA-A, B, or C can display proteins from an Orthopox oncolytic virus, triggering a T cell response. Several highly conserved HLA-A*0201-restricted CD8+ epitopes encoded by VACV have been identified (Terajima et al. (2002) Virus Res. 84:67-77, Ennis et al. (2002) J Infect Dis. 185: 1657-1659, and Frey et al. (2003) Jama. 289: 3295-3299). Recombinant modified vaccinia Ankara (MVA) encoding well-defined HLA-A*0201-restricted melanoma tumor antigen (Ag) epitopes generated significantly higher virus-specific CTL responses in comparison to epitope-specific CTL responses in melanoma patients (Smith et al. (2005) J Immunol. 175: 8431-8437). Croft et al. actually demonstrated that more than 80% of VACV peptides presented by MHC-I on infected mouse cells were immunogenic across a population of mice (Croft et al. (2019) Proc National Acad Sci. 116: 3112-3117). VACV-specific CD8+ T cells infiltrate melanoma lesions during acute infection and remain functional which could promote viral clearance (Erkes et al. (2017) J Immunol. 198: 2979-2988).

[0042] Vaccinia virus infection provokes increased susceptibility to NK lysis (Baraz et al. (1999) Bone Marrow Transpl. 24: 179-189, Brutkiewicz (1992) Nat Immun. 1(4):203-214, and Chisholm (2006) J Virol. 80:2225-2233) by eliciting NK activation, proliferation, and accumulation at the site of infection (Bukowski et al. (1983) 131(3):1531-1538, Daniels et al. (2001) J Exp Medicine. 194:29-44, Dokun et al. (2001) Nat Immunol. 2:951-956, and Natuk et al. (1987) J Immunol. 138(3):877-883). NK cells express activating and inhibitory receptors that regulate NK cell function (Ryan et al. (2001) Immunol Rev. 181:126-137, and Lanier (2005) Annu Rev Immunol. 23:225-274). Signals transduced by inhibitory receptors maintain NK cells in a resting state while the loss of inhibitory signals, such as the downregulation of HLA-ABC, or upregulation of ligands for activating receptors on target cells induce NK cell activation (Lanier (2005) Annu Rev Immunol. 23:225-274).

[0043] NKG2A/CD94 is an inhibitory surface receptor expressed by NK cells (Brooks et al. (1997) J Exp Medicine. 185:795-800) and a subset of CD8⁺ T cells (Llano et al. (1998) Proc National Acad Sci. 95:5199-5204). NKG2A ligand (HLA-E) usually presents peptides derived from the leader sequence of other HLA class I molecules to the NKG2A/CD94 heterodimer which inhibits NK cell-mediated lysis (Braud et al. (1998) Nature 391:795-799, Braud et al. (1997) Eur J Immunol 27:1164-1169, and Kaiser et al. (2005) J Immunol. 173:2878-2884). Thereby, HLA-E surface expression on melanoma cells decreases their susceptibility to cytotoxicity from NKG2A⁺/CD8⁺ T cells and NK cells (Braud et al. (2003) Trend Immunol. 24:162-164, and Derré et al. (2006) Cancer Immunol Res. 7:1293-1306).

[0044] NKG2D is an activating receptor that is expressed on the surface of NK, T cell, and macrophage cell lineages. NKG2D ligands are poorly expressed on normal cells but are upregulated on damaged or infected cells or on cancer cells (Zingoni et al. (2018) Front Immunol. 9:476 and Hall et al. (2019) J Immunother Cancer. 7:263). Interestingly, the engagement of NKG2D in CD8+ T cells results in enhanced TCR activation and function (Bauer et al. (1999) Science. 285:727-729, Houchins et al. (1991) J Exp. Medicine. 173:1017-1020, and Jamieson et al. (2002) Immunity. 17:19-29) which facilitates the recognition and destruction of target cells (Bauer et al. (1999) Science. 285:727-729). Thereby, NKG2D receptor signaling was shown to enhance cytolytic activity of virus specific CD8⁺ T cells (Walsh et al. (2008) J Virol. 82:3031-3044).

[0045] Interestingly, the leukocyte integrin LFA-1 is a primary adhesion molecule found on both CD8⁺ T and NK cells which binds to its ligand ICAM-1 expressed on the target cell. ICAM-1/LFA-1 interaction is a common requirement for NK and T cell-mediated cytotoxicity notably by polarizing their cytotoxic machinery towards the target cell (Urlaub et al. (2017) J Immunol. 198:1944-1951, Matumoto (1998) J Immunol. 160(12):5781-5789, Kooyk et al. (1997) Biochem Soc T. 25:515-520, Ding et al. (1999) J Immunol. 163(9):5029-5038, and Dustin et al. (1989) Cold Spring Harb Symp. 54:753-765). In addition, IFNγ is released in large amounts by NK cells and activated CD8⁺ T cells (Esteso et al. (2017) J Biol Chem 292:20472-20480, Villegas-Mendez et al. (2011) J Immunol. 187:2885-2897, and Arany et al. (1998) Arch Dermatol Res. 290:331-334) which in turn markedly increases CTL-mediated cytotoxicity by upregulating TAP and MHC-I expression on target cells (Saunders et al. (1994) J Resp Cell Mol 11:147-152, Seliger et al. (1997) Scand J Immunol. 46:625-632, and Ma et al. (1997) J Biol Chem. 272:16585-16590)

[0046] Many DNA viruses encode proteins that can overcome innate and adaptive antiviral immunity. (Iannello et al. (2006) J Leukocyte Biol. 79:16-35). To note, both human cytomegalovirus (HCMV) and Kaposi's sarcoma-associated herpesvirus (KSHV) dedicate a large portion of their genomes for modulation of host response to infection (Patro (2019) Front Immunol. 10:1155, and Lee et al. (2010) Future Microbiol. 5:1349-1365). However, whether these systems would work in other virus systems is not known, particularly given differences among viruses and factors that may impact immune evasion.

[0047] The signal peptide of HCMV UL40 contains an HLA-E ligand (Prod'homme et al. (2012) J Immunol. 188:2794-2804, and Ulbrecht et al. (2000) J Immunol. 164:5019-5022) which promotes cell surface expression of HLA-E (Tomasec et al. (2000) Science. 287:1031-1033). Binding of HLA-E/UL40 peptide complexes to the inhibitory NK cell receptor NKG2A/CD94 promotes efficient protection against lysis mediated by NKG2A/CD94 NK cells (Ulbrecht et al. (2000) J Immunol. 164:5019-5022, Tomasec et al. (2000) Science. 287:1031-1033, Wang et al. (2002) Proc National Acad Sci. 99:7570-7575, Borrego et al. (1998) J Exp. Medicine. 187:813-818, Braud et al. (1998) Nature 391:795-799, and Lee et al. (1998) Proc National Acad Sci. 95:5199-5204).

[0048] KSHV K5 is a multifunctional protein that plays a key role in evading both innate (NK cell) and adaptive (T cell) antiviral immune responses. The ubiquitin E3 ligase K5 protein downregulates cell surface expression of MHC-I molecules (HLA-A and B) and NKG2D ligands on target cells protecting them against CTL and NK cell cytotoxicity, respectively. (Li et al. (2007) J Virol. 81:2117-2127, Coscoy et al. (2000) Proc National Acad Sci. 97:8051-8056, and Thomas et al. (2008) Proc National Acad Sci. 105:1656-1661). Thereby, K5 dramatically reduces ICAM-1 surface expression on target cells which impairs T cell activation (Coscoy et al. (2001) J Clin Invest. 107:1599-1606) and drastically inhibits NK cell-mediated cytotoxicity (Ishido et al. (2000) Immunity. 13:365-374). Interestingly, K5 specifically promotes endocytosis of IFNγ receptor 1, thereby, inhibiting IFNγ action (Li et al. (2007) J Virol. 81:2117-2127)(Urlaub et al. (2017) J Immunol. 198:1944-1951, Matumoto (1998) J Immunol. 160(12):5781-5789, and Kooyk et al. (1997) Biochem Soc T. 25:515-520) (Ding et al. (1999) J Immunol. 163(9):5029-5038, Dustin et al. (1989) Cold Spring Harb Symp. 54:753-765, and Esteso et al. (2017) J Biol Chem 292:20472-20480).

[0049] The provided embodiments are based on findings that engineering the HCMV glycoprotein UL40 and/or KSHV K5 protein into the genome of a recombinant Orthopoxvirus, such as VACV, results in improved activity to reduce or inhibit innate and/or adaptive immune responses against the virus. In some embodiments, provided herein is a recombinant nucleic acid which encodes a recombinant Orthopoxvirus genome with one or more transgenes that include (a) a nucleotide sequence encoding HCMV glycoprotein UL40 and/or (b) a nucleotide sequence encoding KSHV K5 protein. In some embodiments, the nucleic acid is used to generate a recombinant Orthopoxvirus. In some embodiments, UL40 and/or K5 expression reduces or inhibits NK and/or T-cell mediated killing of Orthopoxvirus infected cells. In some embodiments, the expressed UL40 and/or K5 are retained within the cell interior which restricts their protective function to the virus-infected cells. In some embodiments, evasion from lysis induced by NK and CD8⁺ T cells promote viral persistence within the infected tumor, thereby maximizing the expression of other immunomodulatory transgenes (e.g., cytokines, chemokines, TME modifiers, bispecific T cell engagers) which also may be encoded in the recombinant nucleotide.

[0050] In provided aspects, results herein show that UL40 expressed from the recombinant nucleic acid significantly decreases T cell mediated killing of virus infected cells which is surprising as UL40 had not previously been shown to decrease T cell mediated killing. In some embodiments, surface HLA-E expression is increased on target melanoma cells used for T cell cytotoxicity-mediated killing assay when UL40 is expressed from a nucleic acid or from an Orthopoxvirus. In some embodiments, UL40 expressing Orthopoxvirus can promote viral persistence within the tumor by protecting the Orthopoxvirus infected cancer cell from tumor specific NKG2A/CD94 CD8⁺ TIL.

[0051] An explanation of why the results for UL40 and/or K5 genes were surprising will now be provided. Large-DNA viruses encode many proteins that are dedicated to host immune evasion Deletion of immunomodulatory genes is a novel genetic approach to oncolytic vaccinia virus (VACV) development, which attenuates viral replication in healthy cells but not in cancer cells. Some of VACV immunomodulatory proteins are secreted from the infected cells and act as a soluble decoy to neutralize complement factors, interferons, cytokines, and chemokines. Other VACV proteins suppress innate immune response by inhibiting signalling pathways that lead to apoptosis and production of interferon, pro-inflammatory cytokines, and chemokines

[0052] Although vaccinia virus infection can provoke increased susceptibility to lysis mediated by both NK and T cells, VACV immunomodulatory protein(s) that might contribute to the evasion of NK and T cell immunity (if any) remain(s) to be discovered. On the other hand, herpesviruses, such as HCMV and KSHV, encode numerous immunomodulatory proteins known to interfere in each step of the antigen presentation pathway and activation of NK cells. In particular, HCMV UL40 promotes efficient protection against killing mediated by NK cells while the multifunctional protein KSHV K5 can inhibit cytotoxicity-induced by NK and T cells. In the context of viral infection, HCMV and KSHV do not rely solely on UL40 and K5 but act in synergy with a myriad of other viral immunomodulatory proteins to evade both NK and T cell immunity.

[0053] Embodiments of the SKV backbone described herein are derived from the Copenhagen strain of VACV by deleting numerous immunomodulatory genes at the 5p and 3p locus as well as the B8R gene. In the studies described in the examples, the superior level of protection against NK and T-cell-mediated lysis provided by solely UL40 and/or K5 in SKV infected cells was unforeseen. Indeed, one might have expected the need to express additional immunomodulatory proteins (e.g., NK and T cell inhibitors) to reach such high level of defense against NK and T cell immunity as was observed solely for UL40 and/or K5 in SKV infected cells.

[0054] In some embodiments, the findings herein support a combination therapy of recombinant Orthopoxvirus expressing UL40(+/−K5) with an adoptive T cell therapy. In some embodiments, the T cell therapy may be an autologous bulk and/or selected tumor-infiltrating lymphocytes. In some embodiments, recombinant Orthopoxvirus can be administrated before, concurrently with or after treatment with a tumor infiltrating lymphocyte therapy.

[0055] All publications, including patent documents, scientific articles and databases, referred to in this application are incorporated by reference in their entirety for all purposes to the same extent as if each individual publication were individually incorporated by reference. If a definition set forth herein is contrary to or otherwise inconsistent with a definition set forth in the patents, applications, published applications and other publications that are herein incorporated by reference, the definition set forth herein prevails over the definition that is incorporated herein by reference.

[0056] The section headings used herein are for organizational purposes only and are not to be construed as limiting the subject matter described.

### I. DEFINITIONS

[0057] Unless defined otherwise, all terms of art, notations and other technical and scientific terms or terminology used herein are intended to have the same meaning as is commonly understood by one of ordinary skill in the art to which the claimed subject matter pertains. In some cases, terms with commonly understood meanings are defined herein for clarity and/or for ready reference, and the inclusion of such definitions herein should not necessarily be construed to represent a substantial difference over what is generally understood in the art.

[0058] As used herein, the singular forms “a,” “an,” and “the” include plural referents unless the context clearly dictates otherwise. For example, “a” or “an” means “at least one” or “one or more.” It is understood that aspects and variations described herein include “consisting” and/or “consisting essentially of” aspects and variations.

[0059] Throughout this disclosure, various aspects of the claimed subject matter are presented in a range format. It should be understood that the description in range format is merely for convenience and brevity and should not be construed as an inflexible limitation on the scope of the claimed subject matter. Accordingly, the description of a range should be considered to have specifically disclosed all the possible sub-ranges as well as individual numerical values within that range. For example, where a range of values is provided, it is understood that each intervening value, between the upper and lower limit of that range and any other stated or intervening value in that stated range is encompassed within the claimed subject matter. The upper and lower limits of these smaller ranges may independently be included in the smaller ranges, and are also encompassed within the claimed subject matter, subject to any specifically excluded limit in the stated range. Where the stated range includes one or both of the limits, ranges excluding either or both of those included limits are also included in the claimed subject matter. This applies regardless of the breadth of the range.

[0060] The term “about” as used herein refers to the usual error range for the respective value readily known to the skilled person in this technical field. Reference to “about” a value or parameter herein includes (and describes) embodiments that are directed to that value or parameter per se. For example, description referring to “about X” includes description of “X”.

[0061] As used herein, “optional” or “optionally” means that the subsequently described event or circumstance does or does not occur, and that the description includes instances where said event or circumstance occurs and instances where it does not. For example, an optionally substituted group means that the group is unsubstituted or is substituted.

[0062] The term “autologous” as used herein means a cell or tissue that is removed from the same organism to which it is later infused or adoptively transferred.

[0063] As used herein, a composition refers to any mixture of two or more products, substances, or compounds, including cells. It may be a solution, a suspension, liquid, powder, a paste, aqueous, non-aqueous or any combination thereof.

[0064] The term “pharmaceutical composition” refers to a composition suitable for pharmaceutical use in a mammalian subject, often a human. A pharmaceutical composition typically comprises an effective amount of an active agent (e.g., cells, such as expanded in accord with the provided methods) and a carrier, excipient, or diluent. The carrier, excipient, or diluent is typically a pharmaceutically acceptable carrier, excipient or diluent, respectively.

[0065] A “pharmaceutically acceptable carrier” refers to a non-toxic solid, semisolid, or liquid filler, diluent, encapsulating material, formulation auxiliary, or carrier conventional in the art for use with a therapeutic agent that together comprise a “pharmaceutical composition” for administration to a subject. A pharmaceutically acceptable carrier is non-toxic to recipients at the dosages and concentrations employed and are compatible with other ingredients of the formulation. The pharmaceutically acceptable carrier is appropriate for the formulation employed.

[0066] As used herein, a “subject” is a mammal, such as a human or other animal, and typically is human. The subject can be male or female and can be any suitable age, including infant, juvenile, adolescent, adult, and geriatric subjects.

[0067] The terms “effective amount” or “therapeutically effective amount” refer to a quantity and/or concentration of a therapeutic composition, such as containing cells, e.g. expanded in accord with the provide methods, that when administered to a patient yields any manner in which the symptoms of a condition, disorder or disease or other indication, are ameliorated or otherwise beneficially altered. An effective amount for treating a disease or disorder may be an amount that relieves, lessens, or alleviates at least one symptom or biological response or effect associated with the disease or disorder, prevents progression of the disease or disorder, or improves physical functioning of the patient. In particular aspects, there is a statistically significant inhibition of disease progression as, for example, by ameliorating or eliminating symptoms and/or the cause of the disease. In the case of cell therapy, the effective amount is an effective dose or number of cells administered to a patient. In some embodiments the patient is a human patient.

[0068] As used herein, “disease,” disorder” or “condition” refers to a pathological condition in an organism resulting from cause or condition including, but not limited to, infections, acquired conditions, genetic conditions, and characterized by identifiable symptoms. In particular, it is a condition where treatment is needed and/or desired.

[0069] The terms “treating,” “treatment,” or “therapy” of a disease or disorder as used herein mean slowing, stopping or reversing the disease or disorders progression, as evidenced by decreasing, cessation or elimination of either clinical or diagnostic symptoms, by administration of an immunomodulatory protein or engineered cells of the present disclosure either alone or in combination with another compound as described herein. “Treating,” “treatment,” or “therapy” also means a decrease in the severity of symptoms in an acute or chronic disease or disorder or a decrease in the relapse rate as for example in the case of a relapsing or remitting autoimmune disease course or a decrease in inflammation in the case of an inflammatory aspect of an autoimmune disease. “Preventing,” “prophylaxis,” or “prevention” of a disease or disorder as used in the context of this disclosure refers to the administration of an immunomodulatory protein or engineered cells expressing an immunomodulatory protein of the present disclosure, either alone or in combination with another compound, to prevent the occurrence or onset of a disease or disorder or some or all of the symptoms of a disease or disorder or to lessen the likelihood of the onset of a disease or disorder. For example, in the context of cancer, the terms “treatment” or, “inhibit,” “inhibiting” or “inhibition” of cancer refers to at least one of: a statistically significant decrease in the rate of tumor growth, a cessation of tumor growth, or a reduction in the size, mass, metabolic activity, or volume of the tumor, as measured by standard criteria such as, but not limited to, the Response Evaluation Criteria for Solid Tumors (RECIST), or a statistically significant increase in progression free survival (PFS) or overall survival (OS).

[0070] As used herein, the terms “delete,” “deletion,” and the like refer to modifications to a gene or a regulatory element associated therewith or operatively linked thereto (e.g., a transcription factor-binding site, such as a promoter or enhancer element) that remove the gene or otherwise render the gene nonfunctional. Exemplary deletions, as described herein, include the removal of the entirety of a nucleic acid encoding a gene of interest, from the start codon to the stop codon of the target gene. Other examples of deletions as described herein include the removal of a portion of the nucleic acid encoding the target gene (e.g., one or more codons, or a portion thereof, such as a single nucleotide deletion) such that, upon expression of the partially-deleted target gene, the product (e.g., RNA transcript, protein product, or regulatory RNA) is nonfunctional or less functional then a wild-type form of the target gene. Exemplary deletions as described herein include the removal of all or a portion of the regulatory element(s) associated with a gene of interest, such as all or a portion of the promoter and/or enhancer nucleic acids that regulate expression of the target gene.

[0071] As used herein, the term “endogenous” describes a molecule (e.g., a polypeptide, nucleic acid, or cofactor) that is found naturally in a particular organism (e.g., a human) or in a particular location within an organism (e.g., an organ, a tissue, or a cell, such as a human cell).

[0072] As used herein, the term “exogenous” describes a molecule (e.g., a polypeptide, nucleic acid, or cofactor) that is not found naturally in a particular organism (e.g., a human) or in a particular location within an organism (e.g., an organ, a tissue, or a cell, such as a human cell). Exogenous materials include those that are provided from an external source to an organism or to cultured matter extracted there from.

[0073] As used herein, the term “percent (%) sequence identity” refers to the percentage of amino acid (or nucleic acid) residues of a candidate sequence that are identical to the amino acid (or nucleic acid) residues of a reference sequence after aligning the sequences and introducing gaps, if necessary, to achieve the maximum percent sequence identity (e.g., gaps can be introduced in one or both of the candidate and reference sequences for optimal alignment and non-homologous sequences can be disregarded for comparison purposes). Alignment for purposes of determining percent sequence identity can be achieved in various ways that are within the skill in the art, for instance, using publicly available computer software, such as BLAST, ALIGN, or Megalign (ONASTAR) software. Those skilled in the art can determine appropriate parameters for measuring alignment, including any algorithms needed to achieve maximal alignment over the full length of the sequences being compared. For example, a reference sequence aligned for comparison with a candidate sequence may show that the candidate sequence exhibits from 50% to 100% sequence identity across the full length of the candidate sequence or a selected portion of contiguous amino acid (or nucleic acid) residues of the candidate sequence. The length of the candidate sequence aligned for comparison purposes may be, for example, at least 30%, (e.g., 30%, 40, 50%, 60%, 70%, 80%, 90%, or 100%) of the length of the reference sequence. When a position in the candidate sequence is occupied by the same amino acid residue as the corresponding position in the reference sequence, then the molecules are identical at that position.

[0074] As used herein, the term “operatively linked” in the context of a polynucleotide fragment is intended to mean that the two polynucleotide fragments are joined such that the amino acid sequences encoded by the two polynucleotide fragments remain in-frame.

[0075] As used herein, the term “vector” refers to a nucleic acid vector, e.g., a DNA vector, such as a plasmid, a RNA vector, virus or other suitable replicon (e.g., viral vector). A variety of vectors have been developed for the delivery of polynucleotides encoding exogenous proteins into a prokaryotic or eukaryotic cell. Examples of such expression vectors are disclosed in, e.g., WO 1994/11026; incorporated herein by reference. Expression vectors of the disclosure may contain one or more additional sequence elements used for the expression of proteins and/or the integration of these polynucleotide sequences into the genome of a host cell, such as a mammalian cell (e.g., a human cell). Exemplary vectors that can be used for the expression of antibodies and antibody fragments described herein include plasmids that contain regulatory sequences, such as promoter and enhancer regions, which direct gene transcription. Vectors may contain nucleic acids that modulate the rate of translation of a target gene or that improve the stability or nuclear export of the mRNA that results from gene transcription. These sequence elements may include, e.g., 5′ and 3′ untranslated regions, an internal ribosomal entry site (IRES), and polyadenylation signal site in order to direct efficient transcription of the gene carried on the expression vector. The vectors described herein may also contain a polynucleotide encoding a marker for selection of cells that contain such a vector. Examples of a suitable marker include genes that encode resistance to antibiotics, such as ampicillin, chloramphenicol, kanamycin, or nourseothricin. As used herein, the term “VH” refers to the variable region of an immunoglobulin heavy chain of an antibody, including the heavy chain of an Fv, scFv, or Fab. References to “VL” refer to the variable region of an immunoglobulin light chain, including the light chain of an Fv, scFv, dsFv or Fab. Antibodies (Abs) and immunoglobulins (Igs) are glycoproteins having the same structural characteristics. While antibodies exhibit binding specificity to a specific target, immunoglobulins include both antibodies and other antibody-like molecules which lack target specificity. Native antibodies and immunoglobulins are usually heterotetrameric glycoproteins of about 150,000 Daltons, composed of two identical light (L) chains and two identical heavy (H) chains. Each heavy chain of a native antibody has at the amino terminus a variable domain (VH) followed by a number of constant domains. Each light chain of a native antibody has a variable domain at the amino terminus (VL) and a constant domain at the carboxy terminus.

[0076] The term “expression”, as used herein, refers to the process by which a polypeptide is produced based on the encoding sequence of a nucleic acid molecule, such as a gene. The process may include transcription, post-transcriptional control, post-transcriptional modification, translation, post-translational control, post-translational modification, or any combination thereof.

[0077] It is understood that aspects and embodiments of the disclosure described herein include “comprising,” “consisting,” and “consisting essentially of” aspects and embodiments

### II. TRANSGENES

[0078] In various embodiments, an oncolytic Orthopoxvirus provided herein is encoded by a nucleic acid containing a recombinant Orthopoxvirus genome and one or more transgenes. In some embodiments, such recombinant Orthopoxviruses are modified in their genomic sequence by the one or more transgenes. In particular embodiments as provided herein, the one or more transgenes are transgenes that are able to inhibit innate and/or adaptive immune responses, such as via activity that results in reduced cytotoxic activity of NK cells and/or T cells against cells infected by the recombinant oncolytic virus. In some embodiments, the one or more transgenes is HCMV glycoprotein UL40 (also termed “UL40) and/or KSHV K5 (also termed “K5”). In some embodiments, provided is an oncolytic Orthopoxvirus encoded by a nucleic acid containing a recombinant Orthopoxvirus genome and a transgene encoding UL40. In some embodiments, provided is an oncolytic Orthopoxvirus encoded by a nucleic acid containing a recombinant Orthopoxvirus genome and a transgene encoding K5. In some embodiments, provided is an oncolytic Orthopoxvirus encoded by a nucleic acid containing a recombinant Orthopoxvirus genome, a transgene encoding K5 and a transgene encoding UL40.

[0079] In some embodiments, the exogenous transgenes when expressed with a viral genome, reduces NK cell and T cell activation. In some embodiments, the one or more transgenes encode a protein or proteins to reduce NK cell and/or T cell activation. In some embodiments, the one or more transgenes encode a protein or proteins to reduce NK cell and/or T cell activation and also encode one or more additional transgenes. In some embodiments, the one or more additional transgenes is an immunomodulatory transgene, such as a cytokines, chemokine, tumor microenvironment (TME) modifier, or a bispecific T cell engagers. In some embodiments the additional transgenes are selected from the group consisting of a checkpoint inhibitor, an interleukin, a cytokine. In some embodiments, the one or more transgenes encode a protein or proteins to reduce NK cell and/or T cell activation (e.g. K5 and/or UL40) and an immunomodulatory protein selected from the group consisting of a checkpoint inhibitor, an interleukin, a cytokine. In some embodiments, the one or more transgenes can additionally include an additional NK cell and/or T cell inhibitor.

[0080] In some embodiments, the one or more transgenes are exogenous genes that are inserted into the genome. In some embodiments the genome is an Orthopoxvirus genome. In some embodiments, the Orthopoxvirus genome corresponds to any genomes described in section III. In particular embodiments, the Orthopoxvirus genome is a VACV.

[0081] In some embodiments, the one or more transgenes is inserted into the 5′ locus of the orthopoxvirus genome in a region. In some embodiments, the locus 5p. Locus 5p is the location of genes C2L, C1L, N1L, N2L, M1L, M2L, K1L, K2L, K3L, K4L, K5L, K6L, K7R, F1L, F2L, and F3L. In some embodiments the one or more transgenes is inserted through homologous recombination. In some embodiments, the homologous recombination is carried out by using a cassette with the one or more transgenes present along with a nucleotide sequence homologous to C2L and a second nucleotide sequence homologous to F3L.

A. UL40 and/or K5 Transgenes

[0082] In some embodiments, the one or more transgenes reduces NK cell and T cell activation. In some embodiments the one or more transgenes reduces NK cell activation. In some embodiments, the one or more transgenes reduces T cell activation. In some embodiments, the one or more transgenes reduces NK cell and/or T cell mediated killing of virus infected cells. In some embodiments, the one or more transgenes encode UL40. In some embodiments, the one or more transgenes include UL40 with a sequence put forth in SEQ ID NO:1. In some embodiments, the one or more transgenes encode K5. In some embodiments, the one or more transgenes include K5 with a sequence put forth in SEQ ID NO: 2. In some embodiments, the one or more transgenes encode both UL40 and K5. In some embodiments the one or more transgenes encode UL40 and/or K5 along with other transgenes.

[0083] UL40 is a protein encoded by human cytomegalovirus with a representative embodiment of the amino acid sequence set forth in SEQ ID NO: 3 and Uniprot P16780. In some embodiments, UL40 has been inserted into a recombinant Orthopoxvirus genome at the locus 5p. In some embodiments the one or more transgenes is operatively linked to an early or late promoter. In some embodiments, the promoter is H5R. In some embodiments, the promoter is an early H5R promoter. In some embodiments, the promoter is a late H5R promoter. In some embodiments the promoter has a sequence set forth in SEQ ID NO: 4. In some embodiments, the promoter is p7.5. In some embodiments, the promoter has a sequence set forth in SEQ ID NO: 5. UL40 contains an HLA-E binding peptide in its leader sequence (Prod'homme et al. (2012) J Immunol. 188:2794-2804, and Ulbrecht et al. (2000) J Immunol 164:5019-5022) which upon binding to HLA-E promotes cell surface expression of HLA-E (Tomasec et al. (2000) Science 287:1031-1033). Binding of HLA-E/UL40 peptide complex to the inhibitory NK surface receptor NKG2A/CD94 promotes efficient protection against lysis mediated by NKG2A/CD94 NK cells (Ulbrecht et al. (2000) J Immunol 164:5019-5022, Tomasec et al. (2000) Science 287:1031-1033, Wang et al. (2002) Proc National Acad Sci. 99:7570-7575, Borrego et al. (1998) J Exp Medicin. 187:813-818, Braud et al. (1998) Nature. 391:795-799, and Llano et al. (1998) Proc National Acad Sci. 95:5199-5204). Unexpectedly, this disclosure contains what is believed to be the first report of UL40 protecting virus-infected cells against killing mediated by T cells. NKG2A/CD94 can be expressed on a subset of CD8⁺ T cells.

[0084] In some embodiments UL40 refers to a cytomegalovirus (e.g., human cytomegalovirus) gene, such as a gene that encodes a protein that contains an HLA-E ligand which promotes cell surface expression of HLA-E. A nonlimiting example of a protein sequence encoded by an exemplary UL40 gene in is given in UniProtKB database entry P16780 and is reproduced below:

(SEQ ID NO: 3)
MNKFSNTRIGFTCAVMAPRTLILTVGLLCMRIRSLLCSPAETTVTTAAV
TSAHGPLCPLVFQGWAYAVYHQGDMALMTLDVYCCRQTSNNTVVAFSHH
PADNTLLIEVGNNTRRHVDGISCQDHFRAQHQDCPAQTVHVRGVNESAF
GLTHLQSCCLNEHSQLSERVAYHLKLRPATFGLETWAMYTVGILALGSF
SSFYSQIARSLGVLPNDHHYALKKA.

[0085] K5 is a protein encoded by Kaposi's sarcoma-associated herpesvirus with a representative embodiment of the amino acid sequence set forth in SEQ ID NO 6. In some embodiments, K5 has been inserted into a recombinant Orthopoxvirus genome at the locus 5p. In some embodiments the one or more transgenes is operatively linked to an early or late promoter. In some embodiments, the promoter is H5R. In some embodiments, the promoter is an early H5R promoter. In some embodiments, the promoter is a late H5R promoter. In some embodiments the promoter has a sequence set forth in SEQ ID NO: 4. In some embodiments, the promoter is p7.5. In some embodiments, the promoter has a sequence set forth in SEQ ID NO: 5. K5 is a multifunctional protein that inhibits killing mediated by both NK and T cells by promoting endocytosis of MHC class I molecules, NKG2D ligands, and ICAM_1 on infected cells which protect infected cells from killing mediated by both NK and T cells.

[0086] In some embodiments, K5 refers to a Rhadinovirus (e.g., Kaposi's sarcoma-associated herpesvirus) gene, such as a gene that encodes a ubiquitin ligase protein which downregulates cell surface expression of MHC-I molecules and NKG2D ligands. A nonlimiting example of a protein sequence encoded by an exemplary K5 gene in is given in UniProtKB database entry F5H9K4 and is reproduced below:

(SEQ ID NO: 6)
MASKDVEEGVEGPICWICREEVGNEGIHPCACTGELDVVHPQCLSTWLT
VSRNTACQMCRVIYRTRTQWRSRLNLWPEMERQEIFELFLLMSVVVAGL
VGVALCTWTLLVILTAPAGTFSPGAVLGFLCFFGFYQIFIVFAFGGICR
VSGTVRALYAANNTRVTVLPYRRPRRPTANEDNIELTVLVGPAGGTDEE
PTDESSEGDVASGDKERDGSSGDEPDGGPNDRAGLRGTARTDLCAPTKK
PVRKNHPKNNG.

### B. Additional Transgenes

[0087] In some embodiments, additional transgenes can be encoded in the nucleic acid. These transgenes can encode proteins that are or are used to deliver virus trackers, checkpoint inhibitors, cytokines, interleukins, immunomodulatory agents, and therapeutic agents. In some embodiments, immunomodulatory agents are selected from: FMS-like tyrosine kinase 3 ligand (FLT3L), an antibody that specifically binds to CTLA-4, and an Interleukin 12 (IL-12) polypeptide, optionally wherein the IL-12 polypeptide is a membrane-bound IL-12. In some embodiments, the additional transgenes encode one or more of the following: FLT3L, CTLA-4, and an IL-12 polypeptide, optionally wherein the IL-12 polypeptide is a membrane-bound IL-12. In some embodiments, the additional transgenes encode all of the following: FLT3L, CTLA-4, and an IL-12 polypeptide, optionally wherein the IL-12 polypeptide is a membrane-bound IL-12.

[0088] In some embodiments, the additional transgenes contain a nucleic acid that encodes a checkpoint inhibitor. In some embodiments, the checkpoint inhibitor is an antibody that binds to CTLA-4. In some embodiments, the additional transgenes contain a nucleic acid which encodes an anti-CTLA-4 antibody or antigen-binding fragment thereof. In some embodiments the additional transgene is a nucleic acid encoding a gene for an anti-CTLA-4 antibody or antigen-binding fragment thereof and a promoter operably linked to the gene. In specific embodiments, the anti-CTLA-4 antibody or antigen-binding fragment thereof encoded by the nucleic acid sequence comprises the 6 complementarity-determining regions (CDRs) of ipilimumab. In specific embodiments, the gene encoded by the nucleic acid sequence encodes an amino acid sequence comprising the amino acid sequence set forth in SEQ ID NO: 7. In specific embodiments, the nucleic acid sequence comprises the sequence set forth in SEQ ID NO: 8.

[0089] In some embodiments, the additional transgenes contain a nucleic acid that encodes an interleukin. In some embodiments, the interleukin is IL-12. In some embodiments, the IL-12 is membrane bound. In some embodiments, the IL-12 is IL-12p35. In specific embodiments, the IL-12 polypeptide is membrane-bound. In specific embodiments, the IL-12 polypeptide comprises IL-12 p35 (e.g., human IL-12 p35), IL-12 p40 (e.g., human IL-12 p40) or IL-12 p70 (e.g., human IL-12 p70). In specific embodiments, the IL-12 polypeptide is membrane-bound and comprises IL-12 p35 (e.g., human IL-12 p35), or IL-12 p70 (e.g., human IL-12 p70), and a transmembrane domain and a cytoplasmic domain (e.g., the transmembrane and cytoplasmic domains of B7-1, TNFa, or FLT3L). In specific embodiments, the IL-12 polypeptide comprises the amino acid sequence set forth in SEQ ID NO: 9. In specific embodiments, the second nucleotide sequence comprises the sequence set forth in SEQ ID NO: 10. In specific embodiments, the IL-12 polypeptide is IL-12 p40 and comprises the amino acid sequence set forth in SEQ ID NO: 11. In specific embodiments, the second nucleotide sequence comprises the sequence set forth in SEQ ID NO: 12.

[0090] In some embodiments the additional transgenes contain a nucleic acid that encodes a cytokine. In some embodiments the cytokine is an Flt3 ligand (FLT3L). In some embodiments the Flt3 ligand is soluble. In particular embodiments, the FLT3L is a soluble form of human FLT3L. In certain embodiments, the FLT3L is a soluble form of the human FL T3L set forth in GenBank Accession No. U03858. 1. For example, in specific embodiments, the FLT3L lacks the entire FLT3L transmembrane (e.g., the transmembrane domain of the human FLT3L set forth in GenBank Accession No. U03858.1) In other examples, the FLT3L sequence lacks at least 80%, at least 85%, at least 90%, or at least 95% of the FLT3L transmembrane domain (e.g., the transmembrane domain of the human FLT3L set forth in GenBank Accession No. U03858.1). In one embodiment, the FLT3L sequence lacks the entire FLT3L transmembrane domain and the entire FLT3L cytoplasmic domain. In another embodiment, the FLT3L sequence lacks at least 80%, at least 85%, at least 90%, or at least 95% of the FLT3L transmembrane domain and the entire FLT3L cytoplasmic domain. In another embodiment, the FLT3L sequence lacks at least 80%, at least 85%, at least 90%, or at least 95% of the FLT3L transmembrane domain and at least 25%, at least 30%, at least 40%, at least 50%, at least 60%, at least 70%, at least 80%, at least 85%, at least 90%, or at least 95% of the FLT3L cytoplasmic domain. In another embodiment, the FLT3L sequence lacks the entire FLT3L transmembrane domain and 5, 6, 7, 8, 9, 10, 12, 13, 14, or 15 of the N-terminal amino acid residues of the FLT3L cytoplasmic domain. In another embodiment, the FLT3L sequence lacks the entire FLT3L transmembrane domain and 1, 2, 3, or 4 of the N-terminal amino acid residues of the FLT3L cytoplasmic domain. In certain of the embodiments and aspects, the transmembrane and cytoplasmic domains are of the FLT3L sequence set forth in GenBank Accession No. U03858.1.

[0091] In some embodiments, the additional transgenes can include virus trackers. In some embodiments, the virus trackers are a fluorescent protein. In some embodiments the fluorescent protein is an RFP. In some embodiment, the fluorescent protein is GFP. In some embodiments, the GFP is encoded by a sequence as set forth in SEQ ID NO: 13. In some embodiment, the additional transgene is operatively linked to a promoter. In some embodiments, the promoter is an early/late promoter. In some embodiments, the promoter is a E3L promoter. In some embodiments, the promoter sequence is set forth in SEQ ID NO: 14.

### III. RECOMBINANT ORTHOPOXVIRUS

[0092] In some embodiments, a nucleic acid encodes a recombinant Orthopoxvirus genome such that the nucleic acid is capable of producing an Orthopoxvirus which can in turn infect cells. In some embodiments, the Orthopoxvirus targets tumor cells. In some embodiments, an Orthopoxvirus is generated using a nucleic acid described in this disclosure. In some embodiments, an Orthopoxvirus is generated from a nucleic acid which contains a recombinant Orthopoxvirus genome and one or more transgenes. In some embodiments, an Orthopoxvirus is generated from a nucleic acid which contains a recombinant Orthopoxvirus genome and one or more transgenes containing (a) nucleotide sequence encoding UL40 and/or (b) a nucleotide sequence encoding K5. In some embodiments, an Orthopoxvirus generated from a nucleic acid disclosed herein, can be used to treat cancer in a subject. In some embodiments, the Orthopoxvirus is a Vaccinia virus. In some embodiments, the Vaccinia virus is a recombinant Vaccinia virus generated from a Copenhagen strain of Vaccinia virus.

[0093] In some embodiments, the nucleic acid contains an Orthopoxvirus genome with a nucleotide sequence at least 80%, at least 85%, at least 90%, or at least 95% similar to the sequence set forth in SEQ ID NO:15 In some embodiments, the Orthopoxvirus is a parental SKV and is encoded in the sequence set forth in SEQ ID NO: 15. In some embodiments, an Orthopoxvirus is encoded in the sequence set forth in SEQ ID NO: 15 with one or more transgenes described in section II added.

[0094] In some embodiments, the Orthopoxvirus is SKV-UL40. In some embodiments, SKV-UL40 is encoded by the sequence set forth in SEQ ID NO: 16.

[0095] In some embodiments, the Orthopoxvirus is SKV-K5. In some embodiments, SKV-K5 is encoded by the sequence set forth in SEQ ID NO: 17.

[0096] In some embodiments, the Orthopoxvirus is SKV-UL40_K5. In some embodiments, SKV-UL40_K5 is encoded by the sequence set forth in SEQ ID NO: 18.

### A. Orthopox and Vaccinia Viruses

[0097] Vaccinia virus is a member of the poxvirus or Poxviridae family, the Chordopoxyirinae subfamily, and the Orthopoxvirus genus. Orthopoxvirus is relatively more homogeneous than other members of the Chordopoxyirinae subfamily and includes 11 distinct but closely related species, which includes vaccinia virus, variola virus (causative agent of smallpox), cowpox virus, buffalopox virus, monkeypox virus, mousepox virus and horsepox virus species as well as others (see Moss, 1996).

[0098] Vaccinia virus is a large, complex enveloped virus having a linear double-stranded DNA genome of about 190 kb and encoding approximately 250 genes. Vaccinia is well-known for its role as a vaccine that eradicated smallpox. Post-eradication of smallpox, scientists have been exploring the use of vaccinia as a tool for delivering genes into biological tissues (gene therapy and genetic engineering). Vaccinia virus is unique among DNA viruses as it replicates only in the cytoplasm of the host cell. Therefore, a large genome is required to encode various enzymes and proteins needed for viral DNA replication. During replication, vaccinia produces several infectious forms, which differ in their outer membranes: the intracellular mature virion (IMV), the intracellular enveloped virion (IEV), the cell-associated enveloped virion (CEV), and the extracellular enveloped virion (EEV). IMV is the most abundant infectious form and is thought to be responsible for spread between hosts. On the other hand, the CEV is believed to play a role in cell-to-cell spread, and the EEV is thought to be important for long range dissemination within the host organism.

[0099] Vaccinia virus is closely related to the virus that causes cowpox. The precise origin of vaccinia is unknown, but the most common view is that vaccinia virus, cowpox virus, and variola virus (the causative agent for smallpox) were all derived from a common ancestral virus. There is also speculation that vaccinia virus was originally isolated from horses. A vaccinia virus infection is mild and typically asymptomatic in healthy individuals, but it may cause a mild rash and fever, with an extremely low rate of fatality. An immune response generated against a vaccinia virus infection protects that person against a lethal smallpox infection. For this reason, vaccinia virus was used as a live-virus vaccine against smallpox. The vaccinia virus vaccine is safe because it does not contain the smallpox virus, but occasionally certain complications and/or vaccine adverse effects may arise, especially if the vaccine is immunocompromised.

[0100] Exemplary strains of the vaccinia virus include, but are not limited to, Copenhagen, Western Reserve, Wyeth, Lister, EM63, ACAM2000, LC16m8, CV-1, modified vaccinia Ankara (MVA), Dairen I, GLV-1h68, IHD-J, L-IVP, LC16m8, LC16mO, Tashkent, Tian Tan, and W AU86/88-1.

[0101] In one aspect, provided herein is a nucleic acid comprising an Orthopoxvirus genome and one or more transgenes. In some embodiments, the one or more transgenes are inserted into the Orthopox virus genome, creating one nucleic acid. In some embodiments, the Orthopoxvirus genome is a Vaccinia virus genome. In some embodiments, the Vaccinia virus genome is from a strain selected from Copenhagen, Western Reserve, Wyeth, Lister, EM63, ACAM2000, LC16m8, CV-1, modified vaccinia Ankara (MVA), Dairen I, GLV-1h68, IHD-J, L-IVP, LC16m8, LC16mO, Tashkent, Tian Tan, and W AU86/88-1, or is an attenuated version of any of the foregoing. In some embodiments, the Vaccinia virus genome is from a Copenhagen, TianTan, Lister, Wyeth, or Western Reserve strain or is a recombinant attenuated strain thereof. In some embodiments the Orthopoxvirus genome is used as a backbone for inserting one or more transgenes into.

[0102] In some embodiments, the Orthopoxvirus genome is a recombinant Orthopoxvirus genome is an attenuated strain that is attenuated by modification to delete various genes to enhance the oncolytic activity of the orthopoxvirus. In some embodiments, the deletions are deletions of genes that are either involved in blocking a host response to viral infection or otherwise have an unknown function.

[0103] In some embodiments, the Vaccinia virus is derived from a Copenhagen (Cop) strain, such as a Copenhagen strain that is a modified attenuated strain. In some embodiments, the attenuated Copenhagen strain is deleted genes that include deletion of one or more of C1L, N1L, N2L, M1L, M2L, K1L, K2L, K3L, K4L, K5L, K6L, K7R, F1L, F2L, F3L, B14R, B15R, B16R, B17L, B18R, B20R, B21R, B22R, B23R, B24R, B25R, B26R, B27R, B28R, B29R and B8R. In some embodiments, at least 2, 3, 4, 5, 6, 7, 8, 9, 10, 11, 12, 13, 14, 15, 16, 17, 18, 19, 20, 21, 22, 23, 24, 25, 26, 27, 28, 29, 30 or 31 of the above genes are deleted from the recombinant orthopox genome. In some embodiments, all of the above genes are deleted from the recombinant orthopoxvirus genome.

[0104] In some embodiments, B8R refers to an Orthopoxvirus (e.g., vaccinia, e.g., Copenhagen) gene, such as a gene that encodes a secreted protein with homology to the gamma interferon (IFN-7) receptor. A nonlimiting example of a protein sequence encoded by an exemplary B8R gene in a Copenhagen strain of the vaccinia virus is given in UniProtKB database entry P21004 and a nonlimiting example of a nucleic acid sequence is set forth in SEQ ID NO:19.

[0105] The B8R may also include fragments or variants of the protein listed above, or of homologous genes from another vaccinia virus strain. Variants include, without limitation, those sequences having 85 percent or greater identity to the sequences disclosed herein.

[0106] In some embodiments, B14R refers to an Orthopoxvirus (e.g., vaccinia, e.g., Copenhagen) gene. An example of a protein sequence encoded by an exemplary B14R gene in a Copenhagen strain of the vaccinia virus is given in UniProtKB database entry P20842 and a nonlimiting example of a nucleic acid sequence is set forth in SEQ ID NO: 20.

[0107] In some embodiments, B15R refers to an Orthopoxvirus (e.g., vaccinia, e.g., Copenhagen) gene. An example of a protein sequence encoded by an exemplary B15R gene in a Copenhagen strain of the vaccinia virus is given in UniProtKB database entry P21089 and a nonlimiting example of a nucleic acid sequence is set forth in SEQ ID NO: 21.

[0108] In some embodiments, B16R refers to an Orthopoxvirus (e.g., vaccinia, e.g., Copenhagen) gene, such as a gene that encodes a IL-1-beta inhibitor. An example of a protein sequence encoded by an exemplary B16R gene in a Copenhagen strain of the vaccinia virus is given in UniProtKB database entry P21116 and a nonlimiting example of a nucleic acid sequence is set forth in SEQ ID NO: 22.

[0109] In some embodiments, B17L refers to an Orthopoxvirus (e.g., vaccinia, e.g., Copenhagen) gene. An example of a protein sequence encoded by an exemplary B17L gene in a Copenhagen strain of the vaccinia virus is given in UniProtKB database entry P21075 and a nonlimiting example of a nucleic acid sequence is set forth in SEQ ID NO: 23.

[0110] In some embodiments, B18R refers to an Orthopoxvirus (e.g., vaccinia, e.g., Copenhagen) gene, such as a gene that encodes an Ankyrin repeat protein. An example of a protein sequence encoded by an exemplary B18R gene in a Copenhagen strain of the vaccinia virus is given in UniProtKB database entry P21076 and a nonlimiting example of a nucleic acid sequence is set forth in SEQ ID NO: 24.

[0111] In some embodiments, B19R refers to an Orthopoxvirus (e.g., vaccinia, e.g., Copenhagen) gene, such as a gene that encodes a IFN-alpha-beta-receptor-like secreted glycoprotein. An example of a protein sequence encoded by an exemplary B19R gene in a Copenhagen strain of the vaccinia virus is given in UniProtKB database entry P21077 and a nonlimiting example of a nucleic acid sequence is set forth in SEQ ID NO: 25.

[0112] In some embodiments, B20R refers to an Orthopoxvirus (e.g., vaccinia, e.g., Copenhagen) gene, such as a gene that encodes an Ankyrin repeat protein. An example of a protein sequence encoded by an exemplary B20R gene in a Copenhagen strain of the vaccinia virus is given in UniProtKB database entry P21078 and a nonlimiting example of a nucleic acid sequence is set forth in SEQ ID NO: 26.

[0113] In some embodiments, C1L refers to an Orthopoxvirus (e.g., vaccinia, e.g., Copenhagen) gene. An example of a protein sequence encoded by an exemplary C1L gene in a Copenhagen strain of the vaccinia virus is given in UniProtKB database entry P21036 and a nonlimiting example of a nucleic acid sequence is set forth in SEQ ID NO: 27.

[0114] In some embodiments, C2L refers to an Orthopoxvirus (e.g., vaccinia, e.g., Copenhagen) gene, such as a gene that encodes a kelch-like protein that affects calcium-independent adhesion to the extracellular matrix. An example of a protein sequence encoded by an exemplary C2L gene in a Copenhagen strain of the vaccinia virus is given in UniProtKB database entry P21037 and a nonlimiting example of a nucleic acid sequence is set forth in SEQ ID NO: 28.

[0115] In some embodiments, F1L refers to a Orthopoxvirus (e.g., vaccinia, e.g., Copenhagen) gene, such as a gene that encodes a caspase-9 inhibitor. An example of a protein sequence encoded by an exemplary F1L gene in a Copenhagen strain of the vaccinia virus is given in UniProtKB database entry P68450 and a nonlimiting example of a nucleic acid sequence is set forth in SEQ ID NO: 29.

[0116] In some embodiments, F2L refers to an Orthopoxvirus (e.g., vaccinia, e.g., Copenhagen) gene, such as a gene that encodes a deoxyuridine triphosphatase (dUTPase). An example of a protein sequence encoded by an exemplary F2L gene in a Copenhagen strain of the vaccinia virus is given in UniProtKB database entry P68634 and a nonlimiting example of a nucleic acid sequence is set forth in SEQ ID NO: 30.

[0117] In some embodiments, F3L refers to an Orthopoxvirus (e.g., vaccinia, e.g., Copenhagen) gene, such as a gene that encodes a kelch-like protein that is an innate immune response modifier and a virulence factor. An example of a protein sequence encoded by an exemplary F3L gene in a Copenhagen strain of the vaccinia virus is given in UniProtKB database entry P21013 and a nonlimiting example of a nucleic acid sequence is set forth in SEQ ID NO: 31.

[0118] In some embodiments, K1L refers to an Orthopoxvirus (e.g., vaccinia, e.g., Copenhagen) gene, such as a gene that encodes an NF-KB inhibitor. An example of a protein sequence encoded by an exemplary K1L gene in a Copenhagen strain of the vaccinia virus is given in UniProtKB database entry P20632 and a nonlimiting example of a nucleic acid sequence is set forth in SEQ ID NO: 32.

[0119] In some embodiments, K2L refers to an Orthopoxvirus (e.g., vaccinia, e.g., Copenhagen) gene, such as a gene that encodes a serine protease inhibitor that prevents cell fusion. An example of a protein sequence encoded by an exemplary K2L gene in a Copenhagen strain of the vaccinia virus is given in UniProtKB database entry P20532 and a nonlimiting example of a nucleic acid sequence is set forth in SEQ ID NO: 33.

[0120] In some embodiments, K3L refers to an Orthopoxvirus (e.g., vaccinia, e.g., Copenhagen) gene, such as a gene that encodes a PKR inhibitor. An example of a protein sequence encoded by an exemplary K3L gene in a Copenhagen strain of the vaccinia virus is given in UniProtKB database entry P20639 and a nonlimiting example of a nucleic acid sequence is set forth in SEQ ID NO: 34.

[0121] In some embodiments, K4L refers to an Orthopoxvirus (e.g., vaccinia, e.g., Copenhagen) gene, such as a gene that encodes a DNA modifying nuclease (e.g., DNA nicking enzyme). An example of a protein sequence encoded by an exemplary K4L gene in a Copenhagen strain of the vaccinia virus is given in UniProtKB database entry P20537 and a nonlimiting example of a nucleic acid sequence is set forth in SEQ ID NO: 35.

[0122] In some embodiments, K5L refers to an Orthopoxvirus (e.g., vaccinia, e.g., Copenhagen) gene, such as a gene that encodes a putative monoglyceride lipase. An example of a protein sequence encoded by an exemplary K5L gene in a Copenhagen strain of the vaccinia virus is given in UniProtKB database entry P21084 and a nonlimiting example of a nucleic acid sequence is set forth in SEQ ID NO: 36.

[0123] In some embodiments, K6L refers to an Orthopoxvirus (e.g., vaccinia, e.g., Copenhagen) gene, such as a gene that encodes a putative monoglyceride lipase. An example of a protein sequence encoded by an exemplary K6L gene in a Copenhagen strain of the vaccinia virus is given in UniProtKB database entry P68465 and a nonlimiting example of a nucleic acid sequence is set forth in SEQ ID NO: 37.

[0124] In some embodiments, K7R refers to an Orthopoxvirus (e.g., vaccinia, e.g., Copenhagen) gene, such as a gene that encodes an inhibitor of NF-κB and IRF3. An example of a protein sequence encoded by an exemplary K7R gene in a Copenhagen strain of the vaccinia virus is given in UniProtKB database entry P68467 and a nonlimiting example of a nucleic acid sequence is set forth in SEQ ID NO: 38.

[0125] In some embodiments, M1L refers to an Orthopoxvirus (e.g., vaccinia, e.g., Copenhagen) gene, such as a gene that encodes an Ankyrin repeat protein. An example of a protein sequence encoded by an exemplary M1L gene in a Copenhagen strain of the vaccinia virus is given in UniProtKB database entry P20640 and a nonlimiting example of a nucleic acid sequence is set forth in SEQ ID NO: 39.

[0126] In some embodiments, M2L refers to an Orthopoxvirus (e.g., vaccinia, e.g., Copenhagen) gene, such as a gene that encodes an inhibitor of NF-KB and apoptosis. An example of a protein sequence encoded by an exemplary M2L gene in a Copenhagen strain of the vaccinia virus is given in UniProtKB database entry Q1PJ18 and a nonlimiting example of a nucleic acid sequence is set forth in SEQ ID NO: 40.

[0127] In some embodiments, N1L refers to an Orthopoxvirus (e.g., vaccinia, e.g., Copenhagen) gene, such as a gene that encodes a BCL-2-like protein that inhibits NF-κB and apoptosis. An example of a protein sequence encoded by an exemplary N1L gene in a Copenhagen strain of the vaccinia virus is given in UniProtKB database entry P21054 and a nonlimiting example of a nucleic acid sequence is set forth in SEQ ID NO: 41.

[0128] In some embodiments, N2L refers to an Orthopoxvirus (e.g., vaccinia, e.g., Copenhagen) gene, such as a gene that encodes an inhibitor of IRF3. An example of a protein sequence encoded by an exemplary N2L gene in a Copenhagen strain of the vaccinia virus is given in UniProtKB database entry P20641 and a nonlimiting example of a nucleic acid sequence is set forth in SEQ ID NO: 42.

[0129] In some embodiments, the Orthopoxvirus genome to which the one or more transgenes (e.g. K5 and/or UL40) is inserted includes any as described in WO2019134048, WO2019134049, WO2020124273, and WO2020124274, each herein incorporated by reference in their entirety. In some embodiments, the Orthopox genome is designated CopMD5p, CopMD3p or CopMD5p3p. In some embodiments, CopMD5p represents a clone, which was found to harbor major genomic deletions in 5′ genes (deletions in representative 5′ genes C2L, C1L, N1L, N2L, MIL, M2L, K1L, K2L, K3L, K4L, K5L, K6L, K7R, F1L, F2L, F3L). In some embodiments, CopMD3p represents a clone with deletions in 3′ genes (e.g. B14R, B15R, B16R, B17L, B18R, B19R, and B20R) as well as deletions in each of the B21R, B22R, B23R, B24R, B25R, B26R, B27R, B28R, and B29R copies of ITRs. CopMD5p3p is a double deleted genome which contains both 5′ gene deletions and 3′ gene deletions as well as the deletions in ITR genes such that the genome has deletions in the C2L, C1L, N1L, N2L, MIL, M2L, K1L, K2L, K3L, K4L, K5L, K6L, K7R, FIL, F2L, F3L, B14R, B15R, B16R, B17L, B18R, B19R, and B20R genes, as well as deletions in each of the B21R, B22R, B23R, B24R, B25R, B26R, B27R, B28R, and B29R copies of ITRs

[0130] In some embodiments, the Orthopoxvirus genome is a Vaccinia virus genome that further contains deletions of the B8R gene. B8R gene encodes a secreted protein with homology to gamma interferon receptor (IFN-g). In vitro, the B8R protein binds to and neutralizes the antiviral activity of several species of gamma interferon including human and rat gamma interferon; it does not, however, bind significantly to murine IFN-g. In some embodiments, the recombinant Vaccinia virus to which the one or more transgenes (e.g. K5 and/or UL40) are inserted lacks the B8R gene or otherwise has a knock of a portion of B8R gene effectively preventing expression of the gene.

[0131] In some embodiments, the Vaccinia virus genome is a Superior Killing Virus (SKV), an attenuated vector derived from the Copenhagen strain of Vaccinia virus that contains two (2) major deletions at the 5′ and 3′ ends as well as the deletion of the B8R gene as described in (see e.g., WO2020124274 which is incorporated by reference in its entirety). Some embodiments provide a nucleic acid comprising an Orthopoxvirus genome comprising: (a) deletions in the one or more of the following genes: C2L, C1L, N1L, N2L, M1L, M2L, K1L, K2L, K3L, K4L, K5L, K6L, K7R, F1L, F2L, F3L, B14R, B15R, B16R, B17L, B18R, and B20R; (b) deletions in one or more of the following genes in the 3′ inverted terminal repeat (ITR): B21R, B22R, B23R, B24R, B25R, B26R, B27R, B28R, and B29R; and/or (c) deletion in the B8R gene. In some embodiments, the one or more transgenes (e.g. K5 and/or UL40) is inserted into such a Vaccinia virus genome.

[0132] In some embodiments, a gene deletion removes the entire sequence of the gene. In other embodiments, a gene deletion is a partial deletion, that is, one that removes part of the sequence of the gene. In one embodiment, a gene deletion is a partial deletion that removes at least 30%, at least 40%, at least 50%, at least 60%, at least 70%, at least 80%, at least 90% or at least 95% of the sequence of the gene. In one embodiment, a gene deletion is a partial deletion that removes at least 30%, at least 40%, at least 50%, at least 60%, at least 70%, at least 80%, or at least 90% of the protein coding sequence of the gene. In other embodiments, a gene deletion removes 100% of the sequence of the gene. In yet other embodiments, a gene deletion removes 100% of the protein coding sequence of the gene. In one embodiment, a gene deletion removes at least 50, at least 100, at least 200, at least 300, at least 400, at least 500, at least 600, at least 700, at least 800, at least 900, or at least 1000 nucleotides of the sequence of the gene. In another embodiment, a gene deletion is a partial deletion that removes at least 50, at least 100, at least 200, at least 300, at least 400, at least 500, at least 600, at least 700, at least 800, at least 900, or at least 1000 nucleotides of the sequence of the gene. In a specific embodiment, a partial deletion in a gene results in a partial gene.

[0133] In some embodiments, the Orthopoxvirus genome is a Vaccinia virus genome nucleotide sequence that is at least 80%, at least 85%, at least 90%, or at least 95% similar to SEQ ID NO:15. In some embodiments, the Orthopoxvirus genome is a Vaccinia virus nucleotide sequence set forth in SEQ IN NO: 13. In some embodiments, the one or more transgenes (e.g. K5 and/or UL40) is inserted into a Vaccinia virus genome nucleotide sequence that is at least 80%, at least 85%, at least 90%, or at least 95% similar to SEQ ID NO:15. In some embodiments, the one or more transgenes (e.g. K5 and/or UL40) is inserted into a Vaccinia virus genome nucleotide sequence set forth in SEQ IN NO: 13.

[0134] In some embodiments, one or more transgenes are inserted into a region of the genome at the 5′ end, such as replacing or inserted in a locus of a deleted gene or inserted between two partially deleted gene. In some embodiments, transgenes are inserted between the partial C2L and F3L vaccinia genes (that is, is present between the partial C2L and F3L genes). In some embodiments, a transgene is inserted into the locus of the deletion in the B8R gene (that is, are present in the locus of the deletion in the B8R gene).

[0135] In some embodiments, the UL40 transgene is inserted between the portion of the C2L vaccinia gene that remains and the portion of the F3L vaccinia gene that remains (that is, is present between the portion of the C2L vaccinia gene that remains and the portion of the F3L vaccinia gene that remains). In other embodiments, the UL40 transgene is inserted into the locus of the deletion in the B8R gene (that is, are present in the locus of the deletion in the B8R gene).

[0136] In some embodiments, the K5 transgene is inserted between the portion of the C2L vaccinia gene that remains and the portion of the F3L vaccinia gene that remains (that is, is present between the portion of the C2L vaccinia gene that remains and the portion of the F3L vaccinia gene that remains). In other embodiments, the K5 transgene is inserted into the locus of the deletion in the B8R gene (that is, are present in the locus of the deletion in the B8R gene).

[0137] In some embodiments, the UL40 transgene is inserted between the portion of the C2L vaccinia gene that remains and the portion of the F3L vaccinia gene that remains (that is, is present between the portion of the C2L vaccinia gene that remains and the portion of the F3L vaccinia gene that remains), and the K5 transgene is inserted into the locus of the deletion in the B8R gene (that is, are present in the locus of the deletion in the B8R gene).

[0138] In some embodiments, the K5 transgene is inserted between the portion of the C2L vaccinia gene that remains and the portion of the F3L vaccinia gene that remains (that is, is present between the portion of the C2L vaccinia gene that remains and the portion of the F3L vaccinia gene that remains), and the UL40 transgene is inserted into the locus of the deletion in the B8R gene (that is, are present in the locus of the deletion in the B8R gene).

[0139] In some embodiments, one or more third transgene (e.g. any of the additional transgenes described above) is also inserted into a region of the genome at the 5′ end of the orthopoxvirus (e.g. Vaccinia virus) genome, such as replacing or insertion in a locus of a deleted gene or inserted between two partially deleted gene. In some embodiments, a third transgene is inserted into the locus of the deletion in the B8R gene (that is, are present in the locus of the deletion in the B8R gene). In some cases, at least two transgenes (e.g. UL40 or K5, and the one or more additional transgene) is inserted into the locus of the deletion in the B8R gene (that is, are present in the locus of the deletion in the B8R gene).

[0140] In some embodiments, the nucleic acid containing a recombinant Orthopoxvirus genome and the one or more transgenes (e.g. UL40) includes a sequence that is at least 80%, at least 85%, at least 90%, or at least 95% similar to the sequence set forth in SEQ ID NO: 16. In some embodiments, the nucleic acid containing a recombinant Orthopoxvirus genome and the one or more transgenes (e.g. UL40) includes the sequence set forth in SEQ ID NO: 16.

[0141] In some embodiments, the nucleic acid containing a recombinant Orthopoxvirus genome and the one or more transgenes (e.g. K5) includes a sequence that is at least 80%, at least 85%, at least 90%, or at least 95% similar to the sequence set forth in SEQ ID NO: 17. In some embodiments, the nucleic acid containing a recombinant Orthopoxvirus genome and one or more transgenes (e.g. K5) includes the sequence set forth in SEQ ID NO: 17.

[0142] In some embodiments, the nucleic acid containing a recombinant Orthopoxvirus genome and the one or more transgenes (e.g. K5 and UL40) includes a sequence that is at least 80%, at least 85%, at least 90%, or at least 95% similar to the sequence set forth in SEQ ID NO: 18. In some embodiments, the nucleic acid containing a recombinant Orthopoxvirus genome and one or more transgenes contains the sequence set forth in SEQ ID NO: 18 (e.g. K5 and UL40).

### B. Cells, Cell Lines, and Packaging Cell Lines and Methods of Virus Propagation

[0143] In some embodiments, the provided recombinant orthopoxviruses, including those constructed with one or more gene deletions compared to wild-type or starting virus strain, can be generated by various well known methods. This section summarizes various protocols, by way of example, for producing recombinant orthopoxviruses described herein, such as methods for generating mutated viruses through the use of recombinant DNA technology.

[0144] For example, to generate mutations in the orthopoxvirus genome, native and modified polypeptides may be encoded by a nucleic acid molecule comprised in a vector. Vectors may include, for example, plasmids, cosmids, viruses (bacteriophage, animal viruses, and plant viruses), and artificial chromosomes (e.g., YACs). One of skill in the art would be well equipped to construct a vector through standard recombinant techniques, which are described in Sambrook et al, (1989) and Ausubel et al, 1994, both incorporated herein by reference in their entirety. In addition to encoding a modified polypeptide, a vector may encode non-modified polypeptide sequences such as a tag or targeting molecule.

[0145] In order to propagate a vector in a host cell, it may contain one or more origins of replication sites (often termed“ori”), which is a specific nucleic acid sequence at which replication is initiated. Alternatively, an autonomously replicating sequence (ARS) can be employed if the host cell is yeast.

[0146] In the context of expressing a heterologous nucleic acid sequence, “host cell” refers to a prokaryotic or eukaryotic cell, and it includes any transformable organism that is capable of replicating a vector and/or expressing a heterologous gene encoded by a vector. A host cell can, and has been, used as a recipient for vectors or viruses (which qualify as a vector if they express an exogenous polypeptide). A host cell may be “transfected” or “transformed,” which refers to a process by which exogenous nucleic acid, such as a modified protein-encoding sequence, is transferred or introduced into the host cell. A transformed cell includes the primary subject cell and its progeny. Host cells may be derived from prokaryotes or eukaryotes, including yeast cells, insect cells, and mammalian cells, depending upon whether the desired result is replication of the vector or expression of part or all of the vector-encoded nucleic acid sequences. Numerous cell lines and cultures are available for use as a host cell, and they can be obtained through the American Type Culture Collection (ATCC), which is an organization that serves as an archive for living cultures and genetic materials (www.atcc.org). An appropriate host can be determined by one of skill in the art based on the vector backbone and the desired result. A plasmid or cosmid, for example, can be introduced into a prokaryote host cell for replication of many vectors.

[0147] Bacterial cells used as host cells for vector replication and/or expression include DH5a, JM109, and KCB, as well as a number of commercially available bacterial hosts such as SURE® Competent Cells and SOLOPACK™ Gold Cells (STRATAGENE®, La Jolla, Calif.). Alternatively, bacterial cells such as E. coli LE392 could be used as host cells for phage viruses. Appropriate yeast cells include Saccharomyces cerevisiae, Saccharomyces pombe, and Pichia pastoris. Examples of eukaryotic host cells for replication and/or expression of a vector include HeLa, NIH3T3, Jurkat, 293, COS, CHO, Saos, and PC 12.

[0148] Many host cells from various cell types and organisms are available and would be known to one of skill in the art. Similarly, a viral vector may be used in conjunction with either a eukaryotic or prokaryotic host cell, particularly one that is permissive for replication or expression of the vector. Some vectors may employ control sequences that allow it to be replicated and/or expressed in both prokaryotic and eukaryotic cells. One of skill in the art would further understand the conditions under which to incubate all of the above described host cells to maintain them and to permit replication of a vector. Also understood and known are techniques and conditions that would allow large-scale production of vectors, as well as production of the nucleic acids encoded by vectors and their cognate polypeptides, proteins, or peptides.

[0149] In one aspect, provided herein is a cell containing the nucleic acid described in any previous section. In another aspect, provided herein is a cell comprising the virus described in any previous section. In certain embodiments, the cell provided herein is a mammalian cell (e.g., a human cell). In certain embodiments, the cell provided herein is a host cell.

[0150] In one aspect, provided herein is a cell line comprising the nucleic acid described in any previous section. In another aspect, provided herein is a cell line comprising the virus described in any previous section. In certain embodiments, the cell line provided herein is a mammalian cell line (e.g., a human cell line).

[0151] In one aspect, provided herein is a packaging cell line comprising the nucleic acid described in any previous section. In another aspect, provided herein is a packaging cell line comprising the virus described in any previous section. The packaging cell line can be any cell line suitable for packaging Orthopoxvirus viruses (e.g., vaccinia viruses). In certain embodiments, the packaging cell line provided herein is a mammalian packaging cell line (e.g., a human packaging cell line).

[0152] Exemplary cells that can be used to culture a virus described herein include, for example, the HeLa cells, U20S cells, 293T cells, NIH3T3 cells, Jurkat cells, 293 cells, COS cells, CHO cells, Saos cells, PC12 cells, and chicken embryo fibroblasts (CEF). Exemplary packaging cell lines that can be used to package a virus described herein include, for example, the HeLa cell line, the U2-OS cell line, the HEK293T cell line, the 786-0 cell line, the A549 cell line or an adherent human cancer cell line. In certain embodiments, the cells also express or are engineered to express one or more factors necessary for the replication and/or packaging of the vaccinia virus.

[0153] Also provided herein are methods of propagating a virus described herein using a cell, a cell line, or a packaging cell line as described. In one aspect, provided herein is a method of propagating a virus, comprising culturing a cell, a cell line, or a packaging cell line infected with a virus described herein. In some embodiments, the virus is isolated or purified after propagation.

### C. Exemplary Methods of Genetic Modification

[0154] Methods for the insertion or deletion of nucleic acids from a target genome include those described herein and known in the art. Methods for nucleic acid delivery to effect expression of compositions of the present disclosure are believed to include virtually any method by which a nucleic acid (e.g., DNA, including viral and non-viral vectors) can be introduced into an organelle, a cell, a tissue or an organism, as described herein or as would be known to one of ordinary skill in the art. Such methods include, but are not limited to, direct delivery of DNA such as by injection (U.S. Pat. Nos. 5,994,624, 5,981,274, 5,945,100, 5,780,448, 5,736,524, 5,702,932, 5,656,610, 5,589,466 and 5,580,859, each incorporated herein by reference), including microinjection (Harland and Weintraub, 1985; U.S. Pat. No. 5,789,215, incorporated herein by reference); by electroporation (U.S. Pat. No. 5,384,253, incorporated herein by reference); by calcium phosphate precipitation (Graham and Van Der Eb, 1973; Chen and Okayama, 1987; Rippe et al., 1990); by using DEAE-dextran followed by polyethylene glycol (Gopal, 1985); by direct sonic loading (Fechheimer et al., 1987); by liposome mediated transfection (Nicolau and Sene, 1982; Fraley et al., 1979; Nicolau et al., 1987; Wong et al., 1980; Kaneda et al., 1989; Kato et al., 1991); by microprojectile bombardment (PCT Application Nos. WO 94/09699 and 95/06128; U.S. Pat. Nos. 5,610,042; 5,322,783, 5,563,055, 5,550,318, 5,538,877 and 5,538,880, and each incorporated herein by reference); by agitation with silicon carbide fibers (Kaeppler et al., 1990; U.S. Pat. Nos. 5,302,523 and 5,464,765, each incorporated herein by reference); by Agrobacterium-mediated transformation (U.S. Pat. Nos. 5,591,616 and 5,563,055, each incorporated herein by reference); or by PEG-mediated transformation of protoplasts (Omirulleh et al., 1993; U.S. Pat. Nos. 4,684,611 and 4,952,500, each incorporated herein by reference); by desiccation/inhibition-mediated DNA uptake (Potrykus et al., 1985). Through the application of techniques such as these, organelle(s), cell(s), tissue(s) or organism(s) may be stably or transiently transformed.

[0155] In various embodiments, the Orthopoxviruses are further genetically modified to contain deletions in the B8R gene. The vaccinia virus B8R gene encodes a secreted protein with homology to gamma interferon receptor (IFN-γ). In vitro, the B8R protein binds to and neutralizes the antiviral activity of several species of gamma interferon including human and rat gamma interferon; it does not, however, bind significantly to murine IFN-γ. Deleting the B8R gene prevents the impairment of IFN-γ in humans. In various embodiments, one, two or three trans genes are inserted into the locus of the deleted B8R gene. In some strains, in addition to the transgene(s) present at the site of the B8R deletion, the strain also has, at least one transgene is inserted into an additional locus on the Orthopoxvirus that is not the locus of the deleted B8R gene. In various embodiments, at least one transgene is inserted into boundaries of the 5p deletions, at least one trans gene is inserted into the boundaries of the 3p deletions or both. In various, embodiments at least three, four, five or more trans genes are inserted into the modified Orthopoxvirus genome.

[0156] In various embodiments, the modified Orthopoxvirus genome is used as a vector. In some embodiments, the sequence of the modified Orthopoxvirus genome is the sequence depicted below in SEQ ID NO: 15. In some embodiments, the sequence of the modified Orthopoxvirus genome is a derivative of SEQ ID NO: 15. For example, as noted herein, the modified Orthopoxvirus vector may be modified to express one or more transgenes as discussed herein.

[0157] In some embodiments, the modified Orthopoxvirus genome was modified by homologous recombination. In some embodiments a 5p targeting construct, which is composed of a transgenic expression cassette flanked on each side by a 1 kb homologous region to C2L and a 1 kb homologous region to F3L, was used for the modification. In some embodiments, the transgenic expression cassette encodes UL40. In some embodiments, the transgenic expression cassette had a sequence set forth in SEQ ID NO: 43. In some embodiments, the transgenic expression cassette encodes K5. In some embodiments, the transgenic expression cassette has a sequence set forth in SEQ ID NO: 44. In some embodiments, the transgenic expression cassette encodes both UL40 and K5. In some embodiments, the transgenic expression cassette has a sequence set forth in SEQ ID NO: 45. In some embodiments, the transgenic expression cassette encodes additional transgenes.

[0158] In various embodiments, the modified Orthopoxvirus expresses at least one of the following transgenes: HCMV glycoprotein UL-40 and KSHV K5 protein. Non-limiting examples of sequences of these trans genes and/or of amino acid sequences encoded by them are described in the sequence listing table below.

### IV. PHARMACEUTICAL CARRIER AND COMPOSITIONS

[0159] Various embodiments of the invention also provide pharmaceutical compositions comprising a virus or nucleic acid described in any previous section and a physiologically acceptable carrier. In certain embodiments, the pharmaceutical compositions comprise a therapeutically effective amount of the virus. In certain embodiments, the pharmaceutical compositions may be used in one or more methods of treatment described herein including those for treatment of cancer including solid tumors.

[0160] Therapeutic compositions containing recombinant Orthopoxvirus vectors of the disclosure can be prepared using methods known in the art. For example, such compositions can be prepared using, e.g., physiologically acceptable carriers, excipients or stabilizers (Remington's Pharmaceutical Sciences 16th edition, Osol, A Ed. (1980); incorporated herein by reference), and in a desired form, e.g., in the form of lyophilized formulations or aqueous solutions.

[0161] To induce oncolysis, kill cells, inhibit growth, inhibit metastases, decrease tumor size and otherwise reverse or reduce the malignant phenotype of tumor cells, using the methods and compositions of the present disclosure, one may contact a tumor with the modified Orthopoxvirus, e.g., by administration of the Orthopoxvirus to a patient having cancer by way of, for instance, one or more of the routes of administration described herein. The route of administration may vary with the location and nature of the cancer, and may include, e.g., intradermal, transdermal, parenteral, intravenous, intramuscular, intranasal, subcutaneous, regional (e.g., in the proximity of a tumor, particularly with the vasculature or adjacent vasculature of a tumor), percutaneous, intratracheal, intraperitoneal, intraarterial, intravesical, intratumoral, inhalation, perfusion, lavage, and oral administration and formulation. In specific embodiments, the pharmaceutical composition provided herein is formulated so that it is suitable for the route of administration to be employed. The term “intravascular” is understood to refer to delivery into the vasculature of a patient, meaning into, within, or in a vessel or vessels of the patient. In certain embodiments, the administration is into a vessel considered to be a vein (intravenous), while in others administration is into a vessel considered to be an artery. Veins include, but are not limited to, the internal jugular vein, a peripheral vein, a coronary vein, a hepatic vein, the portal vein, great saphenous vein, the pulmonary vein, superior vena cava, inferior vena cava, a gastric vein, a splenic vein, inferior mesenteric vein, superior mesenteric vein, cephalic vein, and/or femoral vein. Arteries include, but are not limited to, coronary artery, pulmonary artery, brachial artery, internal carotid artery, aortic arch, femoral artery, peripheral artery, and/or ciliary artery. It is contemplated that delivery may be through or to an arteriole or capillary.

[0162] Intratumoral injection, or injection directly into the tumor vasculature is specifically contemplated for discrete, solid, accessible tumors. Local, regional or systemic administration also may be appropriate. The viral particles may advantageously be contacted by administering multiple injections to the tumor, spaced, for example, at approximately 1 cm intervals. In the case of surgical intervention, the present disclosure may be used preoperatively, such as to render an inoperable tumor subject to resection. Continuous administration also may be applied where appropriate, for example, by implanting a catheter into a tumor or into tumor vasculature. Such continuous perfusion may take place, for example, for a period of from about 1-2 hours, to about 2-6 hours, to about 6-12 hours, or about 12-24 hours following the initiation of treatment. Generally, the dose of the therapeutic composition via continuous perfusion may be equivalent to that given by a single or multiple injections, adjusted over a period of time during which the perfusion occurs. It is further contemplated that limb perfusion may be used to administer therapeutic compositions of the present disclosure, particularly in the treatment of melanomas and sarcomas.

[0163] Treatment regimens may vary, and often depend on tumor type, tumor location, disease progression, and health and age of the patient. Certain types of tumor will require more aggressive treatment, while at the same time, certain patients cannot tolerate more taxing protocols. The clinician will be best suited to make such decisions based on the known efficacy and toxicity (if any) of the therapeutic formulations. In certain embodiments, the tumor being treated may not, at least initially, be resectable. Treatments with the therapeutic agent of the disclosure may increase the resectability of the tumor due to shrinkage at the margins or by elimination of certain particularly invasive portions. Following treatments, resection may be possible. Additional treatments subsequent to resection will serve to eliminate microscopic residual disease at the tumor site.

[0164] The treatments may include various “unit doses.” Unit dose is defined as containing a predetermined-quantity of the therapeutic composition. The quantity to be administered, and the particular route and formulation, are within the skill of those in the clinical arts. A unit dose need not be administered as a single injection but may comprise continuous infusion over a set period of time. Unit dose of the present disclosure may conveniently be described in terms of plaque forming units (pfu) for a viral construct. Unit doses may range from 103, 104, 105, 106, 107, 108, 109, 1010, 1011, 1012, to 1013 pfu and higher. Additionally or alternatively, depending on the kind of virus and the titer attainable, one may deliver 1 to 100, 10 to 50, 100-1000, or up to about or at least about 1×104, 1×105, 1×106, 1×107, 1×108, 1×109, 1×1010, 1×1011, 1×1012, 1×1013, 1×1014, or 1×1015 or higher infectious viral particles (vp), including all values and ranges there between, to the tumor or tumor site.

[0165] Another method of delivery of the recombinant Orthopoxvirus genome disclosed herein to cancer or tumor cells may be via intratumoral injection. However, the pharmaceutical compositions disclosed herein may alternatively be administered parenterally, intravenously, intradermally, intramuscularly, transdermally or even intraperitoneally as described in U.S. Pat. Nos. 5,543,158; 5,641,515 and 5,399,363 (each specifically incorporated herein by reference in its entirety). Injection of nucleic acid constructs may be delivered by syringe or any other method used for injection of a solution, as long as the expression construct can pass through the particular gauge of needle required for injection. An exemplary needleless injection system that may be used for the administration of recombinant Orthopoxviruses described herein is exemplified in U.S. Pat. No. 5,846,233. This system features a nozzle defining an ampule chamber for holding the solution and an energy device for pushing the solution out of the nozzle to the site of delivery. Another exemplary syringe system is one that permits multiple injections of predetermined quantities of a solution precisely at any depth (U.S. Pat. No. 5,846,225).

[0166] Mixtures of the viral particles or nucleic acids described herein may be prepared in water suitably mixed with one or more excipients, carriers, or diluents. Dispersions may also be prepared in glycerol, liquid polyethylene glycols, and mixtures thereof and in oils. Under ordinary conditions of storage and use, these preparations may contain a preservative to prevent the growth of microorganisms. The pharmaceutical forms suitable for injectable use include sterile aqueous solutions or dispersions and sterile powders for the extemporaneous preparation of sterile injectable solutions or dispersions (U.S. Pat. No. 5,466,468, specifically incorporated herein by reference in its entirety). In all cases the form may be sterile and may be fluid to the extent that easy syringability exists. It may be stable under the conditions of manufacture and storage and must be preserved against the contaminating action of microorganisms, such as bacteria and fungi. The carrier can be a solvent or dispersion medium containing, for example, water, ethanol, polyol (e.g., glycerol, propylene glycol, and liquid polyethylene glycol, and the like), suitable mixtures thereof, and/or vegetable oils. Proper fluidity may be maintained, for example, by the use of a coating, such as lecithin, by the maintenance of the required particle size in the case of dispersion and by the use of surfactants. The prevention of the action of microorganisms can be brought about by various antibacterial and antifungal agents, for example, parabens, chlorobutanol, phenol, sorbic acid, thimerosal, and the like. In many cases, it will be preferable to include isotonic agents, for example, sugars or sodium chloride. Prolonged absorption of the injectable compositions can be brought about by the use in the compositions of agents delaying absorption, for example, aluminum monostearate and gelatin.

[0167] For parenteral administration in an aqueous solution, for example, the solution may be suitably buffered if necessary and the liquid diluent first rendered isotonic with sufficient saline or glucose. These particular aqueous solutions are especially suitable for intravenous, intramuscular, subcutaneous, intratumoral and intraperitoneal administration. In this connection, sterile aqueous media that can be employed will be known to those of skill in the art in light of the present disclosure. For example, one dosage may be dissolved in 1 ml of isotonic NaCl solution and either added to 1000 ml of hypodermoclysis fluid or injected at the proposed site of infusion. Some variation in dosage will necessarily occur depending on the condition of the subject being treated. The person responsible for administration will, in any event, determine the appropriate dose for the individual subject. Moreover, for human administration, preparations should meet sterility, pyrogenicity, general safety, and purity standards as required by FDA Office of Biologics standards.

[0168] As used herein, “carrier” includes any and all solvents, dispersion media, vehicles, coatings, diluents, antibacterial and antifungal agents, isotonic and absorption delaying agents, buffers, carrier solutions, suspensions, colloids, and the like. The use of such media and agents for pharmaceutical active substances is well known in the art. Except insofar as any conventional media or agent is incompatible with the active ingredient, its use in the therapeutic compositions is contemplated. Supplementary active ingredients can also be incorporated into the compositions. The phrase “pharmaceutically acceptable” or “pharmacologically-acceptable” refers to molecular entities and compositions that do not produce an allergic or similar untoward reaction when administered to a human. The preparation of an aqueous composition that contains a protein as an active ingredient is well understood in the art. Typically, such compositions are prepared as injectables, either as liquid solutions or suspensions; solid forms suitable for solution in, or suspension in, liquid prior to injection can also be prepared.

### V. KITS

[0169] The nucleic acids, viruses, pharmaceutical carriers and compositions provided herein can be packaged as kits. Kits can optionally include one or more of the following: instructions for use, devices, reagents, and components, such as tubes, containers or syringes. Exemplary kits can include any nucleic acid or virus provided herein and can optionally include instructions for use, a device for administering the virus or nucleic acid to a subject.

[0170] In one aspect, provided herein is a kit comprising a nucleic acid described in sections II and III and a package insert instructing a user of the kit to express the nucleic acid in a host cell. In some embodiments, the kit includes a host cell line. In some embodiments, the kit includes devices to detect viral propagation in a host cell line. In some embodiments, the kit includes devices to detect gene expression, such as a device to detect red or green fluorescent protein which may be encoded in the nucleic acid.

[0171] In another aspect, provided herein is a kit comprising a virus described in section II and III and a package insert instructing a user to administer a therapeutically effective amount of the virus to a subject (e.g., a mammalian subject, such as a human subject) having cancer, thereby treating the cancer. In certain embodiments, the mammalian subject is a human subject. The cancer to be treated can be a cancer described in VI.

[0172] In another aspect, provided herein is a kit comprising a virus or nucleic acid described in section II and III, a second therapeutic agent for the treatment of cancer, and optionally a package insert instructing a user to administer a therapeutically effective amount of the virus and the second therapeutic agent to a subject (e.g., a mammalian subject, such as a human subject) having cancer, thereby treating the cancer. In certain embodiments, the mammalian subject is a human subject. The cancer to be treated can be a cancer described in VI. In some embodiments, the kit includes host cells and/or other reagents for generating a virus from the nucleic acid. In some embodiments, the instructions designate the second therapeutic agent is to be administered before, concurrently with or after administering the recombinant Orthopoxvirus. In some embodiments, the second therapeutic agent is a CAR. In some embodiments, the second therapeutic agent is a checkpoint blockade immunotherapy. In some embodiments, the checkpoint blockade immunotherapy is a PD1 and/or a PD-L1 inhibitor. In some embodiments, the second therapeutic agent is an immunomodulatory agent. In some embodiments, the immunomodulatory agent is a CD47. In some embodiments, the immunomodulatory agent is an NKG2A inhibitor.

[0173] In another aspect, provided herein is a kit comprising a pharmaceutical composition as described in section IV that contains a recombinant Orthopoxvirus. In some embodiments, the kit includes a package insert instructing a user to administer a therapeutically effective amount of the pharmaceutical composition to a subject (e.g., a mammalian subject, such as a human subject) having cancer, thereby treating the cancer. In certain embodiments, the mammalian subject is a human subject. The cancer to be treated can be a cancer described in VI. In some embodiments, the kit includes a second therapeutic agent for the treatment of cancer. In some embodiments, the instructions designate the second therapeutic agent is to be administered before, concurrently with or after administering the pharmaceutical composition. In some embodiments, the second therapeutic agent is a CAR. In some embodiments, the second therapeutic agent is a checkpoint blockade immunotherapy. In some embodiments, the checkpoint blockade immunotherapy is a PD1 and/or a PD-L1 inhibitor. In some embodiments, the second therapeutic agent is an immunomodulatory agent. In some embodiments, the immunomodulatory agent is a CD47. In some embodiments, the immunomodulatory agent is an NKG2A inhibitor.

[0174] In some embodiments, the kit includes a nucleic acid, a virus, or a pharmaceutical composition described in any previous section along with devices, instructions, and or reagents for the user to produce a second therapeutic agent. In some embodiments, the kit includes a package insert instructing a user to administer a therapeutically effective amount of the pharmaceutical composition to a subject (e.g., a mammalian subject, such as a human subject) having cancer, thereby treating the cancer. In some embodiments the second therapeutic agent is an autologous tumor lymphocyte (TIL) therapy. In some embodiments, the Orthopoxvirus or pharmaceutical composition is administered to the subject prior to harvesting the TILs from a tumor from the subject for producing the autologous TIL therapy.

[0175] In preferred embodiments, the nucleic acid or the virus is stored in one or more containers suitable for storing the nucleic acid or the virus. In certain embodiments, the kits provided herein further comprise controls suitable for their intended use.

### VI. METHODS OF TREATMENT AND COMBINATION THERAPY

[0176] Also provided herein are methods of treating a cell proliferation disorder, such as cancer in a subject (e.g., a mammalian subject, such as a human subject).

[0177] In one aspect, provided herein is a method of treating a cell proliferation disorder, such as cancer in a subject (e.g., a mammalian subject, such as a human subject), the method comprising administering to the subject (e.g., a mammalian subject, such as a human subject) a therapeutically effective amount of a virus described in section III.

[0178] In another aspect, provided herein is a method of treating a cell proliferation disorder, such as cancer in a subject (e.g., a mammalian subject, such as a human subject), the method comprising administering to the subject (e.g., a mammalian subject, such as a human subject) a therapeutically effective amount of a pharmaceutical composition described in section IV.

[0179] In a specific embodiment of the method of treating described herein, the mammalian subject is a human subject.

[0180] In certain embodiments of the method of treating described herein, the cancer is selected from the group consisting of leukemia, lymphoma, liver cancer, bone cancer, lung cancer, brain cancer, bladder cancer, gastrointestinal cancer, breast cancer, cardiac cancer, cervical cancer, uterine cancer, head and neck cancer, gallbladder cancer, laryngeal cancer, lip and oral cavity cancer, ocular cancer, melanoma, pancreatic cancer, prostate cancer, colorectal cancer, testicular cancer, and throat cancer.

[0181] In certain embodiments of the method of treating described herein, the cancer is selected from the group consisting of acute lymphoblastic leukemia (ALL), acute myeloid leukemia (AML), chronic lymphocytic leukemia (CLL), chronic myelogenous leukemia (CML), adrenocortical carcinoma, AIDS-related lymphoma, primary CNS lymphoma, anal cancer, appendix cancer, astrocytoma, atypical teratoid/rhabdoid tumor, basal cell carcinoma, bile duct cancer, extrahepatic cancer, Ewing sarcoma family, osteosarcoma and malignant fibrous histiocytoma, central nervous system embryonal tumors, central nervous system germ cell tumors, craniopharyngioma, ependymoma, bronchial tumors, Burkitt lymphoma, carcinoid tumor, primary lymphoma, chordoma, chronic myeloproliferative neoplasms, colon cancer, extrahepatic bile duct cancer, ductal carcinoma in situ (DCIS), endometrial cancer, ependymoma, esophageal cancer, esthesioneuroblastoma, extracranial germ cell tumor, extragonadal germ cell tumor, fallopian tube cancer, fibrous histiocytoma of bone, gastrointestinal carcinoid tumor, gastrointestinal stromal tumors (GIST), testicular germ cell tumor, gestational trophoblastic disease, glioma, childhood brain stem glioma, hairy cell leukemia, hepatocellular cancer, Langerhans cell histiocytosis, Hodgkin lymphoma, hypopharyngeal cancer, islet cell tumors, pancreatic neuroendocrine tumors, Wilms tumor and other childhood kidney tumors, Langerhans cell histiocytosis, small cell lung cancer, cutaneous T cell lymphoma, intraocular melanoma, Merkel cell carcinoma, mesothelioma, metastatic squamous neck cancer, midline tract carcinoma, multiple endocrine neoplasia syndromes, multiple myeloma/plasma cell neoplasm, myelodysplastic syndromes, nasal cavity and paranasal sinus cancer, nasopharyngeal cancer, neuroblastoma, non-Hodgkin's lymphoma (NHL), non-small cell lung cancer (NSCLC), epithelial ovarian cancer, germ cell ovarian cancer, low malignant potential ovarian cancer, pancreatic neuroendocrine tumors, papillomatosis, paraganglioma, paranasal sinus and nasal cavity cancer, parathyroid cancer, penile cancer, pharyngeal cancer, pheochromocytoma, pituitary tumor, pleuropulmonary blastoma, primary peritoneal cancer, rectal cancer, retinoblastoma, rhabdomyosarcoma, salivary gland cancer, Kaposi's sarcoma, rhabdomyosarcoma, Sezary syndrome, small intestine cancer, soft tissue sarcoma, throat cancer, thymoma and thymic carcinoma, thyroid cancer, transitional cell cancer of the renal pelvis and ureter, urethral cancer, endometrial uterine cancer, uterine sarcoma, vaginal cancer, vulvar cancer, and Waldenstrom macroglobulinemia.

[0182] In some embodiments, the cancer can be a melanoma, ovarian cancer, cervical cancer, lung cancer, bladder cancer, breast cancer, head and neck cancer, renal cell carcinoma, acute myeloid leukemia, colorectal cancer, and sarcoma. In some embodiments, the cancer is a cancer with a high mutational burden. In some embodiments, the cancer is melanoma, lung squamous, lung adenocarcinoma, bladder cancer, lung small cell cancer, esophageal cancer, colorectal cancer, cervical cancer, head and neck cancer, stomach cancer or uterine cancer.

[0183] In some embodiments, the cancer is an epithelial cancer. In some embodiments, the cancer is selected from non-small cell lung cancer (NSCLC), CRC, ovarian cancer, breast cancer, esophageal cancer, gastric cancer, pancreatic cancer, cholangiocarcinoma cancer, endometrial cancer. In some embodiments, the breast cancer is HR+/Her2− breast cancer. In some embodiments, the breast cancer is a triple negative breast cancer (TNBC). In some embodiments, the breast cancer is a HER2+ breast cancer.

[0184] In some embodiments, the subject has a cancer that is a hematological tumor. Non-limiting examples of hematological tumors include leukemia, including acute leukemias (such as 11q23-positive acute leukemia, acute lymphocytic leukemia, acute myelocytic leukemia, acute myelogenous leukemia and myeloblastic, promyelocytic, myelomonocytic, monocytic and erythroleukemia), chronic leukemias (such as chronic myelocytic (granulocytic) leukemia, chronic myelogenous leukemia, and chronic lymphocytic leukemia), polycythemia vera, lymphoma, Hodgkin's disease, non-Hodgkin's lymphoma (indolent and high grade forms), multiple myeloma, Waldenstrom's macroglobulinemia, heavy chain disease, myelodysplastic syndrome, hairy cell leukemia and myelodysplasia.

[0185] In some embodiments, the subject has a solid tumor cancer. Non-limiting examples of solid tumors, such as sarcomas and carcinomas, include fibrosarcoma, myxosarcoma, liposarcoma, chondrosarcoma, osteogenic sarcoma, and other sarcomas, synovioma, mesothelioma, Ewing's tumor, leiomyosarcoma, rhabdomyosarcoma, colon carcinoma, lymphoid malignancy, pancreatic cancer, breast cancer (including basal breast carcinoma, ductal carcinoma and lobular breast carcinoma), lung cancers, ovarian cancer, prostate cancer, hepatocellular carcinoma, squamous cell carcinoma, basal cell carcinoma, adenocarcinoma, sweat gland carcinoma, medullary thyroid carcinoma, papillary thyroid carcinoma, pheochromocytomas sebaceous gland carcinoma, papillary carcinoma, papillary adenocarcinomas, medullary carcinoma, bronchogenic carcinoma, renal cell carcinoma, hepatoma, bile duct carcinoma, choriocarcinoma, Wilms' tumor, cervical cancer, testicular tumor, seminoma, bladder carcinoma, and CNS tumors (such as a glioma, astrocytoma, medulloblastoma, craniopharyngioma, ependymoma, pinealoma, hemangioblastoma, acoustic neuroma, oligodendroglioma, meningioma, melanoma, neuroblastoma and retinoblastoma). In several examples, a tumor is melanoma, lung cancer, lymphoma breast cancer or colon cancer.

[0186] In some embodiments, the cancer is a skin cancer. In particular embodiments, the cancer is a melanoma, such as a cutaneous melanoma. In some embodiments, the cancer is a merkel cell or metastatic cutaneous squamous cell carcinoma (CSCC).

[0187] In some embodiments, the tumor is a carcinoma, which is a cancer that develops from epithelial cells or is a cancer of epithelial origin. In some embodiments, the cancer arises from epithelial cells which include, but are not limited to, breast cancer, basal cell carcinoma, adenocarcinoma, gastrointestinal cancer, lip cancer, mouth cancer, esophageal cancer, small bowel cancer and stomach cancer, colon cancer, liver cancer, bladder cancer, pancreas cancer, ovary cancer, cervical cancer, lung cancer, breast cancer and skin cancer, such as squamous cell and basal cell cancers, prostate cancer, renal cell carcinoma, and other known cancers that effect epithelial cells throughout the body.

[0188] In some embodiments, the subject has a cancer that is a gastrointestinal cancer involving a cancer of the gastrointestinal tract (GI tract), including cancers or the upper or lower digestive tract, or an accessory organ of digestion, such as esophagus, stomach, biliary system, pancreas, small intestine, large intestine, rectum or anus. In some embodiments, the cancer is an esophageal cancer, stomach (gastric) cancer, pancreatic cancer, liver cancer (hepatocellular carcinoma), gallbladder cancer, cancer of the mucosa-associated lymphoid tissue (MALT lymphoma), cancer of the biliary tree, colorectal cancer (including colon cancer, rectum cancer or both), anal cancer, or a gastrointestinal carcinoid tumor. In particular embodiments, the cancer is a colorectal cancer.

[0189] In some embodiments, the cancer is a colorectal cancer. Colorectal cancer (CRC) is a common tumor of increasing incidence, which, in many cases, does not response to checkpoint inhibition or other immunotherapy. This is the case even though such cancers have properties that are associated with response, e.g. a reasonably high mutation rate and well established association of prognosis with level of T cell infiltration.

[0190] In some embodiments, the cancer is an ovarian cancer. In some embodiments, the cancer is a triple-negative breast cancer (TNBC).

[0191] In some embodiments, the cancer is lung cancer. In some embodiments, the cancer is a breast cancer. In some embodiments, the cancer is a colorectal cancer. In some embodiments, the cancer is pancreatic cancer. In some embodiments, the cancer is a merkel cell cancer. In some embodiments, the cancer is a metastatic cutaneous squamous cell carcinoma (CSCC). In some embodiments, the cancer is a melanoma.

[0192] In some embodiments, the subject is one whose cancer is refractory to, and or who has relapsed following treatment with, a checkpoint blockade, such as an anti-PD1 or anti-PD-L1 therapy.

[0193] In some embodiments of the method of treating described herein, the virus and the pharmaceutical composition are not administered in combination with another agent for treating the cell proliferation disorder (such as cancer).

[0194] In other embodiments of the method of treating described herein, the virus or the pharmaceutical composition is administered in combination with one or more additional agents or transgenes for treating the cell proliferation disorder (such as cancer), for example, the one or more additional agents or transgenes described in sections III and VI.

[0195] In various embodiments, the recombinant Orthopoxvirus and the pharmaceutical composition disclosed herein can be administered to a subject, e.g., a mammalian subject, such as a human, suffering from a cell proliferation disorder, such as cancer, e.g., to kill cancer cells directly by oncolysis and/or to enhance the effectiveness of the adaptive immune response against the target cancer cells. In some embodiments, the cell proliferation disorder is a cancer, such as leukemia, lymphoma, liver cancer, bone cancer, lung cancer, brain cancer, bladder cancer, gastrointestinal cancer, breast cancer, cardiac cancer, cervical cancer, uterine cancer, head and neck cancer, gallbladder cancer, laryngeal cancer, lip and oral cavity cancer, ocular cancer, melanoma, pancreatic cancer, prostate cancer, colorectal cancer, testicular cancer, or throat cancer. In particular cases, the cell proliferation disorder may be a cancer selected from the group consisting of acute lymphoblastic leukemia (ALL), acute myeloid leukemia (AML), chronic lymphocytic leukemia (CLL), chronic myelogenous leukemia (CML), adrenocortical carcinoma, AIDS-related lymphoma, primary CNS lymphoma, anal cancer, appendix cancer, astrocytoma, atypical teratoid/rhabdoid tumor, basal cell carcinoma, bile duct cancer, extrahepatic cancer, ewing sarcoma family, osteosarcoma and malignant fibrous histiocytoma, central nervous system embryonal tumors, central nervous system germ cell tumors, craniopharyngioma, ependymoma, bronchial tumors, burkitt lymphoma, carcinoid tumor, primary lymphoma, chordoma, chronic myeloproliferative neoplasms, colon cancer, extrahepatic bile duct cancer, ductal carcinoma in situ (DCIS), endometrial cancer, ependymoma, esophageal cancer, esthesioneuroblastoma, extracranial germ cell tumor, extragonadal germ cell tumor, fallopian tube cancer, fibrous histiocytoma of bone, gastrointestinal carcinoid tumor, gastrointestinal stromal tumors (GIST), testicular germ cell tumor, gestational trophoblastic disease, glioma, childhood brain stem glioma, hairy cell leukemia, hepatocellular cancer, langerhans cell histiocytosis, hodgkin lymphoma, hypopharyngeal cancer, islet cell tumors, pancreatic neuroendocrine tumors, wilms tumor and other childhood kidney tumors, langerhans cell histiocytosis, small cell lung cancer, cutaneous T-cell lymphoma, intraocular melanoma, merkel cell carcinoma, mesothelioma, metastatic squamous neck cancer, midline tract carcinoma, multiple endocrine neoplasia syndromes, multiple myeloma/plasma cell neoplasm, myelodysplastic syndromes, nasal cavity and paranasal sinus cancer, nasopharyngeal cancer, neuroblastoma, non-hodgkin lymphoma (NHL), non-small cell lung cancer (NSCLC), epithelial ovarian cancer, germ cell ovarian cancer, low malignant potential ovarian cancer, pancreatic neuroendocrine tumors, papillomatosis, paraganglioma, paranasal sinus and nasal cavity cancer, parathyroid cancer, penile cancer, pharyngeal cancer, pheochromocytoma, pituitary tumor, pleuropulmonary blastoma, primary peritoneal cancer, rectal cancer, retinoblastoma, rhabdomyosarcoma, salivary gland cancer, kaposi sarcoma, rhabdomyosarcoma, sezary syndrome, small intestine cancer, soft tissue sarcoma, throat cancer, thymoma and thymic carcinoma, thyroid cancer, transitional cell cancer of the renal pelvis and ureter, urethral cancer, endometrial uterine cancer, uterine sarcoma, vaginal cancer, vulvar cancer, and Waldenstrom macroglobulinemia.

[0196] A physician or other medical professional having ordinary skill in the art can readily determine an effective amount of the recombinant Orthopoxvirus vector for administration to a subject, e.g., a mammalian subject (e.g., a human) in need thereof. For example, a physician may start prescribing doses of recombinant Orthopoxvirus vector at levels lower than that required in order to achieve the desired therapeutic effect and gradually increase the dosage until the desired effect is achieved. Alternatively, a physician may begin a treatment regimen by administering a dose of recombinant Orthopoxvirus vector and subsequently administer progressively lower doses until a therapeutic effect is achieved (e.g., a reduction in the volume of one or more tumors). In general, a suitable daily dose of a recombinant Orthopoxvirus vector of the disclosure will be an amount of the recombinant Orthopoxvirus vector which is the lowest dose effective to produce a therapeutic effect. A daily dose of a therapeutic composition of the recombinant Orthopoxvirus vector of the disclosure may be administered as a single dose or as two, three, four, five, six or more doses administered separately at appropriate intervals throughout the day, week, month, or year, optionally, in unit dosage forms. While it is possible for the recombinant Orthopoxvirus vector of the disclosure to be administered alone, it may also be administered as a pharmaceutical formulation in combination with excipients, carriers, and optionally, additional therapeutic agents.

[0197] Recombinant Orthopoxvirus vectors of the disclosure can be monitored for their ability to attenuate the progression of a cell proliferation disease, such as cancer, by any of a variety of methods known in the art. For instance, a physician may monitor the response of a subject, e.g., a mammalian subject (e.g., a human) to treatment with recombinant Orthopoxvirus vector of the disclosure by analyzing the volume of one or more tumors in the subject. Alternatively, a physician may monitor the responsiveness of a subject (e.g., a human) t to treatment with recombinant Orthopoxvirus vector of the disclosure by analyzing the T-reg cell population in the lymph of a particular subject. For instance, a physician may withdraw a sample from a subject, e.g., a mammalian subject (e.g., a human) and determine the quantity or density of cancer cells using established procedures, such as fluorescence activated cell sorting. A finding that the quantity of cancer cells in the sample has decreased (e.g., by 1%, 2%, 3%, 4%, 5%, 6%, 7%, 8%, 9%, 10%, 20%, 30%, 40%, 50%, 60%, 70%, 80%, 90%, 95%, 96%, 97%, 98%, 99%, or more) relative to the quantity of cancer cells in a sample obtained from the subject prior to administration of the recombinant Orthopoxvirus may be an indication that the Orthopoxvirus administration is effectively treating the cancer.

### A. Combination Therapy

[0198] In various embodiments, the recombinant Orthopoxvirus vectors or pharmaceutical compositions described herein may be administered with one or more additional agents, such as an immune checkpoint inhibitor. For instance, the recombinant Orthopoxvirus vector can be administered simultaneously with, admixed with, or administered separately from an immune checkpoint inhibitor. Exemplary immune checkpoint inhibitors for use in conjunction with the compositions and methods of the disclosure include but are not limited to OX40 ligand, ICOS ligand, anti-CD47 antibody or antigen-binding fragment thereof, anti-CD40/CD40L antibody or antigen-binding fragment thereof, anti-Lag3 antibody or antigen-binding fragment thereof, anti-CTLA-4 antibody or antigen-binding fragment thereof, anti-PD-LI antibody or antigen-binding fragment thereof, anti-PDl antibody or antigen-binding fragment thereof, and anti-Tim-3 antibody or antigen-binding fragment thereof. Additionally or alternatively, a vector of the disclosure can be administered simultaneously with, admixed with, or administered separately from an interleukin (IL). For instance, the recombinant Orthopoxvirus vector can be administered simultaneously with, admixed with, or administered separately from an interleukin. Exemplary interleukins for use in conjunction with the compositions and methods of the disclosure include but are not limited to IL-1 alpha, IL-1 beta, IL-2, IL-4, IL-7, IL-10, IL-12 p35, IL-12 p40, IL-12 p70, IL-15, IL-18, IL-21, and IL-23. Additionally or alternatively, a vector of the disclosure can be administered simultaneously with, admixed with, or administered separately from an interferon. For instance, the recombinant Orthopoxvirus vector can be administered simultaneously with, admixed with, or administered separately from an interferon.

[0199] Exemplary interferons for use in conjunction with the compositions and methods of the disclosure include but are not limited to IFN-alpha, IFN-beta, IFN-delta, IFN-epsilon, IFN-tau, IFN-omega, IFN-zeta, and IFN-gamma. Additionally or alternatively, a vector of the disclosure can be administered simultaneously with, admixed with, or administered separately from a TNF superfamily member protein. For instance, the recombinant Orthopoxvirus vector can be administered simultaneously with, admixed with, or administered separately from a TNF superfamily member protein. Exemplary TNF superfamily member proteins for use in conjunction with the compositions and methods of the disclosure include but are not limited to TRAIL, Fas ligand, LIGHT (TNFSF-14), TNF-alpha, and 4-1BB ligand. Additionally or alternatively, a vector of the disclosure can be administered simultaneously with, admixed with, or administered separately from a cytokine. For instance, the recombinant Orthopoxvirus vector can be administered simultaneously with, admixed with, or administered separately from a cytokine. Exemplary cytokines for use in conjunction with the compositions and methods of the disclosure includes but are not limited to GM-CSF, Flt3 ligand, CD40 ligand, anti-TGF-beta, anti-VEGF-R2, and cGAS (guanyl adenylate cyclase).

[0200] Additionally or alternatively, immune checkpoint inhibitors may be expressed in the Orthopoxvirus itself. For instance, the recombinant Orthopoxvirus vector can include a transgene encoding an immune checkpoint inhibitor. Exemplary immune checkpoint inhibitors for expression by the Orthopoxvirus of the compositions and methods of the disclosure include but are not limited to OX40 ligand, ICOS ligand, anti-CD47 antibody or antigen-binding fragment thereof, anti-CD40/CD40L antibody or antigen-binding fragment thereof, anti-Lag3 antibody or antigen-binding fragment thereof, anti-CTLA-4 antibody or antigen-binding fragment thereof, anti-PD-LI antibody or antigen-binding fragment thereof, anti-PDl antibody or antigen-binding fragment thereof, and anti-Tim-3 antibody or antigen-binding fragment thereof. Additionally or alternatively, interleukins may be expressed in the Orthopoxvirus itself. For instance, the recombinant Orthopoxvirus vector can include a transgene encoding an interleukin. Exemplary immune checkpoint inhibitors for expression by the Orthopoxvirus of the compositions and methods of the disclosure include but are not limited to IL-1 alpha, IL-1 beta, IL-2, IL-4, IL-7, IL-10, IL-12 p35, IL-12 p40, IL-12 p70, IL-15, IL-18, IL-21, and IL-23. Additionally or alternatively, interferons may be expressed in the Orthopoxvirus itself. For instance, the recombinant Orthopoxvirus vector can include a transgene encoding an interferon. Exemplary interferons for expression by the Orthopoxvirus of the compositions and methods of the disclosure include but are not limited to IFN-alpha, IFN-beta, IFN-delta, IFN-epsilon, IFN-tau, IFN-omega, IFN-zeta, and IFN-gamma. Additionally or alternatively, TNF superfamily member proteins may be expressed in the Orthopoxvirus itself. For instance, the recombinant Orthopoxvirus vector can include a transgene encoding a TNF superfamily member protein. Exemplary TNF superfamily member proteins for expression by the Orthopoxvirus of the compositions and methods of the disclosure include but are not limited to TRAIL, Fas ligand, LIGHT (TNFSF-I4), TNF-alpha, and 4-IBB ligand. Additionally or alternatively, cytokines may be expressed in the Orthopoxvirus itself. For instance, the recombinant Orthopoxvirus vector can include a transgene encoding a cytokine. Exemplary cytokines for expression by the Orthopoxvirus of the compositions and methods of the disclosure include but are not limited to GM-CSF, fins-related tyrosine kinase 3 (Flt3) ligand, CD40 ligand, TGF-beta, VEGF-R2, and c-KIT.

[0201] Additionally or alternatively, tumor-associated antigens may be expressed in the Orthopoxvirus itself. For instance, the recombinant Orthopoxvirus vector can include a transgene encoding a tumor-associated antigen. Exemplary tumor-associated antigens for expression by the Orthopoxvirus of the compositions and methods of the disclosure include but are not limited to CDI9, CD33, EpCAM, CEA, PSMA, EGFRvIII, CD133, EGFR, CDHI9, ENPP3, DLL3, MSLN, RORI, HER2, HLAA2, EpHA2, EpHA3, MCSP, CSPG4, NG2, RON, FLT3, BCMA, CD20, FAPα, FRα, CA-9, PDGFRα, PDGFRβ, FSPI, S100A4, ADAMI2m, RET, MET, FGFR, INSR, NTRK, MAGE-A3, NY-ESO-I, one or more human papillomavirus (HPV) proteins, E6 and E7 proteins of HPVI6, E6 and E7 proteins of HPVI8, brachyury, or prostatic acid phosphatase, or one or more fragments thereof.

[0202] In certain embodiments of the method of treating described herein, the method further comprises administering to the subject (e.g., a mammalian subject, such as a human subject) an immune checkpoint inhibitor. In specific embodiments, the immune checkpoint inhibitor is selected from the group consisting of OX40 ligand, ICOS ligand, anti-CD47 antibody or antigen-binding fragment thereof, anti-CD40/CD40L antibody or antigen-binding fragment thereof, anti-Lag3 antibody or antigen-binding fragment thereof, anti-CTLA-4 antibody or antigen-binding fragment thereof, anti-PD-LI antibody or antigen-binding fragment thereof, anti-PD I antibody or antigen-binding fragment thereof, and anti-Tim-3 antibody or antigen-binding fragment thereof. In a specific embodiment, the immune checkpoint inhibitor is an anti-PD I antibody or antigen-binding fragment thereof or an anti-CTLA-4 antibody or antigen-binding fragment thereof. In another specific embodiment, the immune checkpoint inhibitor is an anti-PD I antibody or antigen-binding fragment thereof. In another specific embodiment, the immune checkpoint inhibitor is an anti-CTLA-4 antibody or antigen-binding fragment thereof. In another specific embodiment, the immune checkpoint inhibitor is an anti-PD-LI antibody or antigen-binding fragment thereof. In a specific embodiment, the immune checkpoint inhibitor is ipilimumab. In another specific embodiment, the immune checkpoint inhibitor is tremelimumab. In another specific embodiment, the immune checkpoint inhibitor is nivolumab. In another specific embodiment, the immune checkpoint inhibitor is pembrolizumab. In another specific embodiment, the immune checkpoint inhibitor is cemiplimab. In another specific embodiment, the immune checkpoint inhibitor is atezolizumab. In another specific embodiment, the immune checkpoint inhibitor is avelumab. In another specific embodiment, the immune checkpoint inhibitor is durvalumab.

[0203] In certain embodiments of the method of treating described herein, the method further comprises administering to the subject (e.g., a mammalian subject, such as a human subject) an interleukin. In specific embodiments, the interleukin is selected from the group consisting of IL-1 alpha, IL-1 beta, IL-2, IL-4, IL-7, IL-10, IL-12 p35, IL-12 p40, IL-12 p70, IL-15, IL-18, IL-21, and IL-23. In specific embodiments, the interleukin is selected from the group consisting of IL-12 p35, IL-12 p40, and IL-12 p70. In specific embodiments, the interleukin is membrane-bound.

[0204] In certain embodiments of the method of treating described herein, the method further comprises administering to the subject (e.g., a mammalian subject, such as a human subject) an interferon. In specific embodiments, the interferon is selected from the group consisting of IFN-alpha, IFN-beta, IFN-delta, IFN-epsilon, IFN-tau, IFN-omega, IFN-zeta, and IFN-gamma.

[0205] In certain embodiments of the method of treating described herein, the method further comprises administering to the subject (e.g., a mammalian subject, such as a human subject) a cytokine. In specific embodiments, the cytokine is a TNF superfamily member protein. In a specific embodiment, the TNF superfamily member protein is selected from the group consisting of TRAIL, Fas ligand, LIGHT (TNFSF-14), TNF-alpha, and 4-1BB ligand. In specific embodiments, the cytokine is selected from the group consisting of GM-CSF, Flt3 ligand, CD40 ligand, TGF-beta, VEGF-R2, and cKit. In a specific embodiment, the cytokine is Flt3 ligand.

B. Combination Therapy with TILs

[0206] Various embodiments of the invention provide methods and uses involving combination therapies involving a T lymphocyte infiltrating (TIL) cell therapy and an oncolytic virus (OV). Also among embodiments provided herein are methods and uses involving a TIL cell therapy in a subject who has previously received treatment with an oncolytic virus. Further among embodiments provided herein are methods and uses involving an oncolytic cell therapy in a subject (also referred to as a patient) who has previously received treatments with a TIL cell therapy. In some embodiments, the methods can be used for treating subjects having or suspected of having a cancer, such as a cancerous solid tumor also referred to as a solid tumor.

[0207] Embodiments of such methods and uses include therapeutic methods and uses, for example, involving administration of the therapeutic cells, or compositions containing the same, to a subject having a cancer. In some cases, the cancer is a tumor. In some embodiments, the cancer is a solid tumor and the methods and uses are for treating a solid tumor in the subject. In some embodiments, the oncolytic virus and cells, or pharmaceutical compositions thereof, are administered in an effective amount to effect treatment of the cancer. Uses include uses of the TIL cell therapy and oncolytic virus, or pharmaceutical compositions thereof, in such methods and treatments, and in the preparation of one or more medicaments in order to carry out such therapeutic methods. In some embodiments, the methods thereby treat the cancer in the subject.

[0208] In some embodiments, the TIL cell therapy includes tumor-reactive T cells though other cells are contemplated as well. In some embodiments, the tumor reactive T cells are obtained from a subject (e.g. a subject with the cancer to be treated) and are enriched ex vivo by processes of selection and expansion. In some embodiments, the tumor-reactive T cells are T cells that recognize a cancer neoantigen. The majority of neoantigens arise from passenger mutations, meaning they do not infer any growth advantage to the cancer cell. A smaller number of mutations actively promote tumor growth, these are known as driver mutations. Passenger mutations are likely to give rise to neoantigens that are unique to each patient and may be present in a subset of all cancer cells. Driver mutations give rise to neoantigens that are likely to be present in all the tumor cells of an individual and potentially shared. In some embodiments of the provided method, the population of T cells include tumor-reactive T cells that can recognize neoantigens containing passenger and/or driver mutations.

[0209] In particular aspects, the provided methods can be used for the ex vivo production of a T cell therapy, including in various embodiments for the ex vivo expansion of autologous tumor-reactive T cells. In some aspects, neoantigens are ideal targets for immunotherapies because they represent disease-specific targets. For example, such antigens generally are not present in the body before the cancer developed and are truly cancer specific, not expressed on normal cells and are not subjected to off target immune toxicity. Thus, the unique repertoire of neoantigens specific to the patient can elicit a strong immune response specific to the cancer cells, avoiding normal cells. This is an advantage over other cell therapy targets that may not be disease-specific targets, since even low levels of target antigen on normal cells can lead to severe fatal autoimmune toxicity in the context of engineered therapies that target common antigens. For example, an anti MAGE-A3-TCR program in melanoma patients was halted due to study related deaths attributed to cross reactivity with a similar target MAGE-A12, which is expressed at a low level in the brain. A significant challenge in cancer immunotherapy has been the identification of cancer targets.

[0210] Recent clinical studies have demonstrated that T cells isolated from surgically resected tumors possess TCRs that recognize neoantigens, and expanding these neoantigen reactive TIL populations and re-infusing them into the patient can in some cases result in a dramatic clinical benefit. This personalized therapy has generated remarkable clinical responses in certain patients with common epithelial tumors.

[0211] Existing methods for obtaining and generating tumor-reactive T cells are not entirely satisfactory. For example, direct isolation of tumor-reactive T cells from a subject without expansion is not feasible because therapeutically effective amounts of such cells cannot be obtained. As an alternative, attempts have been made to identify TCRs specific to a desired neoantigen for recombinant engineering of the TCR into T cells for use in adoptive cell therapy methods. Such approaches, however, produce only a single TCR against a specific neoantigen and thereby lack diversity to recognize a broader repertoire of multiple tumor-specific mutations. Other methods involve bulk expansion of T cells from a tumor source, which has the risk of expanding T cells that are not reactive to a tumor antigen and/or that may include a number of bystander cells that could exhibit inhibitory activity. For example, tumor regulatory T cells (Tregs) are a subpopulation of CD4⁺ T cells, which specialize in suppressing immune responses and could limit reactivity of a T cell product. These further approaches that have sought to expand tumor-reactive T cells ex vivo are not selective such that non-reactive T cells in the culture may preferentially expand over reactive T cells resulting in a final product that lacks satisfactory reactivity and/or in which the number of tumor-reactive T cells remains insufficient. Methods to produce tumor-reactive T cells for therapy are needed.

[0212] In some embodiments, the TIL cell therapy includes T cells from a tumor that have been enriched and expanded ex vivo. In some embodiments, the T cells are enriched based on selection of upregulation (or activation) markers that become upregulated on tumor reactive cells after presentation of neoantigens, followed by expansion of T cells enriched for tumor-reactive T cells. In some cases, the methods may also involve co-culture with antigen presenting cells presenting peptide neoepitopes. For example, the methods of culturing the cells include methods to proliferate and expand cells, particularly involving steps to enrich for proliferation and expansion of tumor-reactive T cells such as by selection of such cells, or based on certain selection markers that are associated with or indicative of tumor-reactive T cells.

[0213] The TIL therapy for use in the provided combination therapy methods and uses include any as described in PCT publication No. WO2020/172202, WO2020/205662, WO2021/108727, and WO2021/174208, each incorporated by reference in their entirety.

[0214] In some embodiments, the TILs are produced by a process in which a population containing T cells is obtained, selected or isolated from a tumor sample from a subject, such as a human subject. In some embodiments, the tumor sample is a tumor fragment or suspension of cell therefrom containing tumor infiltrating lymphocytes or TILs. In some embodiments, the provided methods include (1) Enriching a population containing T cells obtained from a tumor sample of a donor subject to produce a first population of T cells; (2) Stimulating the first population with one or more T-cell stimulating agents of lymphocytes to produce a second population of activated T cells; (3) Co-culturing cells from the second population of T cells in the presence of antigen presenting cells that present one or more peptide (e.g. peptide neoepitopes) on an MHC (MHC-associated non-native peptide), in which the co-culturing produces a third population of cells containing or enriched for T cells that are reactive to a peptides presented on the MHC of an APC (e.g. tumor reactive T cells); (4) from the third population, separating the APCs to produce a fourth population of T cells containing endogenous TCR that are reactive to peptides present on the APCs; and (5) expanding the fourth population of T cells containing tumor reactive T cells by incubation in the presence of T cell stimulating agents. In some embodiments, the separating of the T cells in (4) can involve depleting or removing the APCs and/or can include selection of T cells based on upregulation markers on reactive or activated T cells. In some embodiments, one or more of the steps can be carried out in a closed system using serum free medium.

[0215] In the provided methods, tumor reactive T cells are identified or enriched from the stimulated T cells expanded in the first step by one or more further steps that include ex vivo co-culture of the stimulated T cells (second population of T cells) with antigen presenting cells (APCs) and one or a plurality of peptides that include neoepitopes of a tumor antigen (APCs/peptide neoepitopes). In some embodiments, provided methods include ex vivo co-culture in which the second population of T cells are incubated with APCs, such as autologous APCs or artificial antigen presenting cells (aAPCs), that have been exposed to or contacted with one or more peptides, e.g. synthetic peptides, under conditions in which the APCs have been induced to present one or more peptides from a tumor-associated antigen. In some embodiments, the population of T cells are autologous T cells from a subject with a tumor and the source of synthetic peptides are tumor antigenic peptides from a tumor antigen of the same subject. In some embodiments, cells from the ex vivo co-culture are a population of cells (third population) that include tumor reactive T cells that recognize or are activated by a peptide presented on an MHC of an APC in the culture. In some embodiments, cells from the ex vivo co-culture represent a source of cells that are enriched for tumor reactive T cells.

[0216] In some cases, the tumor reactive T cells can be further enriched by separation or selection of cells that express one or more upregulation marker, such as an activation marker, associated with tumor-reactive T cells (the further separation or selection producing a fourth population of T cells of the enriched tumor reactive T cells). The T cell activation markers can include cell surface markers whose expression is upregulated or specific to T cells that have been exposed to antigen and activated. Exemplary of such markers are described below.

[0217] In particular embodiments, the provided methods include enriching from a biological sample (directly sourced from a sample in vivo or from an ex vivo coculture with antigen presenting cells (APCs)) T cells that have an endogenous TCR that recognize tumor-associated antigens, e.g. neoantigens, such as by selecting for T cells that are surface positive for one or more T cell activation marker (e.g. CD107, CD107a, CD039, CD134, CD137, CD59, CD69, CD90, CD38, or CD103).

[0218] In some embodiments, the TILs are produced by a method that includes the steps of (1) selecting, from a population of cells containing T lymphocytes obtained from a donor subject, cells positive for Chemokine (C—X—C motif) ligand 13 (CXCL13) and/or positive for an exhaustion marker from among PD-1, CD39 and/or TIGIT; and (2) stimulating the population by incubation or culture of selected cells with one or more T-cell stimulating agents of lymphocytes to produce a population of expanded T cells. In some embodiments, the methods for selection and/or stimulation are performed in a closed system. In some embodiments, only a single expansion step is carried out in the method. In some embodiments, an initial expansion (e.g. first expansion) is carried out prior to selecting the cells. In some embodiments, the provided methods further can include a secondary stimulation to further expand cells in which the further stimulation is by incubation or culture with one or more T-cell stimulating agents. In some embodiments, after the first stimulation (first expansion) and prior to the second stimulation (second expansion), the method can further include: (i) co-culturing a population of T cells in the presence of antigen presenting cells that present one or more MHC-associated non-native peptide; (4) Separating antigen presenting cells from the population of T cells in a closed system, such as by selecting for T cells containing endogenous TCR that are reactive to peptides present on the APCs, such as based on upregulation markers or activation markers on T cells following their co-culture with the APCs/peptides. In some embodiments, one or more of the steps is carried out in a closed system. In some embodiments, all of the steps is carried out in a closed system. In some embodiments, the T cell stimulating agent can include any one or more recombinant cytokines IL-2, IL-7, IL-15, IL-21, IL-25, IL-23, IL-27 or IL-25, such as generally at least IL-2 or IL-15. In some embodiments, the T cell stimulating agent can further include an anti-CD3 antibody (e.g. OKT3). In some embodiments, the T cell stimulating agents include an anti-CD3 antibody (OKT3) and/or a recombinant cytokine such as IL-2, IL-7, IL-15, IL-21, IL-25, IL-23. In some embodiments, the stimulation or any culture or incubation of the cells can be further carried out with an apoptosis inhibitor, such as Fas decoys or caspase inhibitors or any combination thereof.

[0219] In some embodiments, the TIL therapy is produced by a process that utilizes an unbiased identification and functional screening process to isolate and selectively expand the greatest breadth of tumor reactive TILs from the subject's tumor. In some embodiments, greater than 60%, greater than 70% or greater than 80% of the cells of the cell therapy are functional and potent tumor reactive T cells. In some embodiments, the TIL cell therapy is administered in an amount of least 10⁹ cells with greater than 70% functional and potent tumor reactive T cells.

[0220] In some embodiments, the subjects is pre-treated with the oncolytic virus. In some embodiments, the subject is first treated with the oncolytic virus therapy prior to isolating, enriching and expanding tumor-reactive T cells from the subject. In some embodiments, the treatment with the oncolytic virus improves or increases extraction of the tumor reactive T cells from the subject's tumor to thereby optimize the TIL harvest from the subject. In some embodiments, the provided methods including: administering the oncolytic virus to the subject, isolating or selecting T cells comprising tumor-reactive T cells from a tumor sample from the subject, selectively expanding tumor-reactive T cells, and administering the expanded tumor reactive T cells to the subject via autologous adoptive cell therapy.

[0221] According to one embodiment a method treating a subject having cancerous tumor, the method comprises delivering an oncolytic virus (OV) to the tumor the OV encodes transgenes for the generation of at least one immune enhancing compound wherein the OV infects the tumor resulting in the generation of the immune enhancing compound in a tumor micro-environment, wherein the generation of the immune enhancing compound enhances at least one of TIL trafficking to the tumor, TIL infiltration of the tumor, TIL function or TIL proliferation within the tumor.

[0222] In some embodiments, the subject receives administration of the oncolytic virus as a post-treatment after receiving the TIL cell therapy. In some embodiments, the subject is first treated with the TIL cell therapy and then is treated with the oncolytic virus. In some embodiments, subsequent treatment with the oncolytic virus optimizes or increases TIL trafficking and infiltration into solid tumors and thereby supports anti-tumor functions of infiltrating immune cells. In some embodiments, the methods include isolating or selecting T cells comprising tumor-reactive T cells from a tumor sample from the subject, selectively expanding tumor-reactive T cells, administering the expanded tumor reactive T cells to the subject via autologous adoptive cell therapy, and administering the oncolytic virus to the subject.

[0223] In some embodiments, the subject is the same subject from which the biological sample was obtained for producing the TIL cell therapy. In other embodiments the subject receiving treatment is different from the subject from which the biological sample was obtained. According to one or more embodiments, the provided method of treatment is an adoptive cell therapy with a therapeutic TIL composition containing T cells autologous to the subject, though the use of non-autologous T-cells is also contemplated in one or more embodiments.

[0224] In some embodiments, the TIL compositions provided herein are autologous to the subject to be treated. In such embodiments, the starting cells for expansion are isolated directly from a biological sample from the subject as described herein, in some cases including with enrichment for T cells positive for one or more selection marker as described and cultured under conditions for expansion as provided herein. In some aspects, the biological sample from the subject is or includes a tumor or lymph node sample and such sample tumor and an amount of such tissue is obtained, such as by resection or biopsy (e.g. core needle biopsy or fine-needle aspiration). In some embodiments, following the culturing under conditions for expansion in accord with the provided methods the cells are formulated and optionally cryopreserved for subsequent administration to the same subject for treating the cancer.

### VII. EXEMPLARY EMBODIMENTS

[0225] Among the provided embodiments are:
[0226] 1. A nucleic acid comprising a recombinant Orthopoxvirus genome and one or more transgenes comprising (a) a nucleotide sequence encoding UL40 and/or (b) a nucleotide sequence encoding K5.
[0227] 2. The nucleic acid of embodiment 1, wherein the recombinant Orthopoxvirus genome is derived from a Vaccinia virus genome.
[0228] 3. The nucleic acid of embodiment 2, wherein the Vaccinia virus genome is derived from a genome of a Copenhagen strain of Vaccinia virus.
[0229] 4. The nucleic acid of any of embodiments 1-4, wherein the Orthopoxvirus genome comprises:
[0230] (a) deletions in one or more of the following genes: C2L, C1L, N1L, N2L, M1L, M2L, K1L, K2L, K3L, K4L, K5L, K6L, K7R, F1L, F2L, F3L, B14R, B15R, B16R, B17L, B18R, B19R, and B20R;
[0231] (b) deletions in one or more of the following genes in the 3′ inverted terminal repeat (ITR): B21R, B22R, B23R, B24R, B25R, B26R, B27R, B28R, and B29R; and/or
[0232] (c) deletion in the B8R gene.
[0233] 5. The nucleic acid of any of embodiments 1-5, wherein the Orthopoxvirus genome comprises:
[0234] (a) deletions in the following genes: C2L, C1L, N1L, N2L, M1L, M2L, K1L, K2L, K3L, K4L, K5L, K6L, K7R, F1L, F2L, F3L, B14R, B15R, B16R, B17L, B18R, B19R and B20R;
[0235] (b) deletions in the following genes in the 3′ inverted terminal repeat (ITR): B21R, B22R, B23R, B24R, B25R, B26R, B27R, B28R and B29R; and
[0236] (c) deletion in the B8R gene.
[0237] 6. The nucleic acid of embodiment 4 or embodiment 5, wherein the deletions in the C2L, F3L, B14R, and B29R vaccinia genes are partial deletions.
[0238] 7. The nucleic acid of any of embodiments 1-6, wherein the Orthopoxvirus genome has at least 95% sequence identity to SEQ ID NO 15.
[0239] 8. The nucleic acid of any of embodiments 1-6, wherein the Orthopoxvirus genome has the sequence set forth in SEQ ID NO 15.
[0240] 9. The nucleic acid of any of embodiment 1-8, wherein the Orthopoxvirus genome comprises a nucleotide sequence encoding UL40.
[0241] 10. The nucleic acid of any of embodiments 1-8, wherein the Orthopoxvirus genome comprises a nucleotide sequence encoding K5.
[0242] 11. The nucleic acid of any of embodiments 1-8, wherein the Orthopoxvirus genome comprises (a) a nucleotide sequence encoding UL40 and (b) a nucleotide sequence encoding K5.
[0243] 12. The nucleic acid of any of embodiments 1-11, wherein the nucleotide sequence encoding UL40 encodes an amino acid sequence with at least 95% sequence identity to SEQ ID NO 3.
[0244] 13. The nucleic acid of any of embodiments 1-12, wherein the nucleotide sequence encoding UL40 encodes the amino acid sequence set forth in SEQ ID NO 3.
[0245] 14. The nucleic acid of any of embodiments 1-13, wherein the nucleotide sequence encoding UL40 comprises a sequence with at least 95% sequence identity to SEQ ID NO 1.
[0246] 15. The nucleic acid of any of embodiments 1-14, wherein the nucleotide sequence encoding UL40 comprises the sequence set forth in SEQ ID NO 1.
[0247] 16. The nucleic acid of any of embodiments 1-15, wherein the nucleotide sequence encoding UL40 is operably linked to a vaccinia virus early/late promoter.
[0248] 17. The nucleic acid of any of embodiments 1-16, wherein the nucleotide sequence encoding K5 encodes an amino acid sequence with at least 95% sequence identity to SEQ ID NO 6.
[0249] 18. The nucleic acid of any of embodiments 1-17, wherein the nucleotide sequence encoding K5 encodes the amino acid sequence set forth in SEQ ID NO 6.
[0250] 19. The nucleic acid of any of embodiments 1-18, wherein the nucleotide sequence encoding K5 comprises a sequence with at least 95% sequence identity to SEQ ID NO 2.
[0251] 20. The nucleic acid of any of embodiments 1-19, wherein the nucleotide sequence encoding K5 comprises the sequence set forth in SEQ ID NO 2.
[0252] 21. The nucleic acid of any of embodiments 1-20, wherein the nucleotide sequence encoding K5 is operably linked to a vaccinia virus early/late promoter.
[0253] 22. The nucleic acid of any of embodiments 1-21, wherein the one or more transgenes comprises at least one further transgene comprising a nucleotide sequence encoding an immunomodulatory protein selected from the group consisting of a checkpoint inhibitor, an interleukin, a cytokine and an NK cell and/or T cell inhibitor.
[0254] 23. The nucleic acid of embodiment 22, wherein the immunomodulatory protein is FMS-like tyrosine kinase 3 ligand (FLT3L), an antibody that specifically binds CTLA-4, or an Interleukin 12 (IL-12) polypeptide, optionally wherein the IL-12 polypeptide is a membrane-bound IL-12.
[0255] 24. The nucleic acid of embodiment 22 or embodiment 23, wherein the nucleotide sequence encoding the at least one further transgene is operably linked to a vaccinia virus early/late promoter.
[0256] 25. The nucleic acid of any of embodiments 16, 21 and 24, wherein the vaccinia virus early/late promoter is selected from H5R, P7.5, and E3L or is selected from SEQ ID NO:4, SEQ ID NO: 5, and SEQ ID NO: 14.
[0257] 26. The nucleic acid of any of embodiments 1-25, wherein the one or more transgenes is inserted into locus 5p of the recombinant Orthopoxvirus genome between C2L and F3L.
[0258] 27. The nucleic acid of any of embodiments 1-26, wherein the one or more transgenes are in the same orientation as endogenous Orthopoxvirus genes within the recombinant Orthopoxvirus genome.
[0259] 28. The nucleic acid of any of embodiments 1-9 and 11-27, wherein expression of UL40 increases HLA-E surface expression in a host cell infected by a recombinant Orthopoxvirus comprising the nucleic acid.
[0260] 29. The nucleic acid of any of embodiments 1-8 and 10-27, wherein expression of K5 decreases HLA-ABC surface expression on a host cell infected by a recombinant Orthopoxvirus comprising the nucleic acid.
[0261] 30. The nucleic acid of any of embodiments 1-8 and 10-27, wherein the expression of K5 decreases ICAM-1 surface expression on a host cell infected by a recombinant Orthopoxvirus comprising the nucleic acid.
[0262] 31. The nucleic acid of any of embodiments 1-30, wherein host cells infected by a recombinant Orthopoxvirus comprising the nucleic acid. are killed by lymphocytes at a reduced rate in comparison to cells infected with a reference recombinant Orthopoxvirus that has a similar genome but does not comprise a nucleotide sequence encoding either UL40 or K5.
[0263] 32. The nucleic acid of any of embodiments 1-31, wherein host cells infected by a recombinant Orthopoxvirus comprising the nucleic acid are killed by NK cells at a reduced rate in comparison to cells infected with a recombinant Orthopoxvirus that has a similar genome but does not comprise a nucleotide sequence encoding either UL40 or K5.
[0264] 33. The nucleic acid of any of embodiments 1-32, wherein host cells infected by a recombinant Orthopoxvirus comprising the nucleic acid are killed by T cells at a reduced rate in comparison to cells infected with a recombinant Orthopoxvirus that has a similar genome but does not comprise a nucleotide sequence encoding either UL40 or K5.
[0265] 34. A recombinant Orthopoxvirus encoded by the nucleic acid of any of embodiments 1-33.
[0266] 35. A pharmaceutical composition comprising the recombinant Orthopoxvirus of embodiment 34 and a physiologically acceptable carrier.
[0267] 36. A method of treating cancer comprising administering the recombinant Orthopoxvirus of embodiment 34 to a subject
[0268] 37. A method of treating cancer comprising administering the pharmaceutical composition of embodiment 35 to a subject
[0269] 38. The method of embodiment 36 or embodiment 37, wherein the subject is human.
[0270] 39. The method of any of embodiments 36-38, further comprising administering a second therapeutic agent for the treatment of cancer.
[0271] 40. The method of embodiment 39, wherein the second therapeutic agent is administered before, concurrently with or after administering the pharmaceutical composition or recombinant Orthopoxvirus.
[0272] 41. The method of embodiment 39 or embodiment 40, wherein the second therapeutic agent is an autologous tumor infiltrating lymphocyte (TIL) therapy.
[0273] 42. The method of embodiment 41, wherein the pharmaceutical composition or recombinant Orthopoxvirus is administered to the subject prior to harvesting the TILs from a tumor from the subject for producing the autologous TIL therapy.
[0274] 43. The method of embodiment 39 or embodiment 40, wherein the second therapeutic agent is CAR T cell therapy.
[0275] 44. The method of embodiment 39 or embodiment 40, wherein the second therapeutic agent is a checkpoint blockade immunotherapy.
[0276] 45. The method of embodiment 44, wherein the checkpoint blockade immunotherapy is a PD1 and/or a PD-L1 inhibitor.
[0277] 46. The method of embodiment 39 or embodiment 40, wherein the second therapeutic agent is an immunomodulatory agent.
[0278] 47. The method of embodiment 46, wherein the immunomodulatory agent is a CD47 inhibitor.
[0279] 48. The method of embodiment 46, wherein the immunomodulatory agent is an NKG2A inhibitor.

### VIII. EXAMPLES

[0280] The following examples are included for illustrative purposes only and are not intended to limit the scope of the invention.

### Example 1 Generation of Oncolytic Recombinant Vaccinia Viruses Encoding Molecules to Reduce Natural Killer (NK) Cell Mediated and T Cell Mediated Antiviral Immune Responses

[0281] Recombinant vaccinia virus (VACV) was generated carrying a gene encoding a human cytomegalovirus (HCMV) glycoprotein UL40, a gene encoding Kaposi's sarcoma-associated herpesvirus (KSHV) K5 or both. UL40 and K5 were chosen as possible VACV transgene candidates to lead to expression of proteins in infected cells that could inhibit NK and T-cell mediated killing of VACV infected cells. Specifically, UL40 contains an HLA-E binding peptide and is able to promote cell surface expression of HLA-E to present the HLA-E/UL40 peptide complex to the inhibitory NK cell receptor NKG2A/CD94. K5 is a ubiquitin E3 ligase which is able to downregulate expression of MHC-I molecules (HLA-A and HLA-B) and ligands of the activating NK receptor NKG2D, and also may decrease ICAM-1 surface expression which could impair CD8⁺ T cells from binding virus infected cells.

[0282] An exemplary recombinant vaccinia virus (VACV) named Superior Killing Virus (SKV) was used as the parent virus for subsequent genetic engineering. SKV is an attenuated vector derived from the Copenhagen strain of VACV that contains 2 major deletions at the 5′ and the 3′ ends as well as the deletion of the B8R gene The SKV virus was modified by insertion of a gene encoding HCMV UL40 (UL40), a gene encoding Kaposi's sarcoma-associated herpesvirus (KSHV) K5 (K5) or both UL40 and K5.

[0283] Three recombinant VACV viruses were engineered by insertion of the open reading frame (ORF) coding for proteins UL40 (SEQ ID NO: 3; Uniprot P16780), K5 (SEQ ID NO: 6; Uniprot F5H9K4), or both into locus 5p, each under control of early/late promoters. Table E1 summarizes the recombinant viruses that were generated. In addition, GFP was inserted into the SKV to track which cells are infected. Expression of the genes were confirmed with RT-qPCR.

TABLE E1
Candidate Recombinant VACV Viruses

| Name | Transgene(s) | SEQ ID NO |
|---|---|---|
| SKV-UL40 recombinant | UL40 | 16 |
| virus | | |
| SKV-K5 recombinant virus | K5 | 17 |
| SKV-UL40_K5 recombinant | UL40 and K5 | 18 |
| virus | | |

[0284] A brief description of methods for generating recombinant viruses will now be provided. DNA homologous recombination (HR) methods for inserting exogenous DNA at genomic loci is widely used to construct Vaccinia virus (VACV) vectors. In one mor more approaches such methods may be carried out by using a shuttle vector for HR, which recombines with VACV genome in pre-infected cells.

[0285] Shuttle plasmids that contain an expression cassette together with an excisable gene marker for the rapid screening of recombinant viruses has been engineered to target the 5p locus within SKV backbone. The transgenic cassette encodes UL40 and/or K5 protein(s) for which expression is driven by two distinct early/late promoters. To note, site-specific recombination system, such as FLP-FRT, can be used to remove the gene marker (GFP) from the newly rescued virus at a later stage.

[0286] For generation of a recombinant SKV virus (expressing one or two transgene(s)), U2OS cells are infected with SKV, and then transfected with the 5p targeting shuttle plasmid. DNA recombination occurs between homologous regions in the shuttle vector and the virus, leading to the insertion of the transgene expression cassette into the targeted locus of SKV.

[0287] Recombinant SKV viruses co-expressing one or two transgene(s) and the fluorescent protein marker are isolated or purified by a standard plaque-picking procedure using fluorescence microscopy. After the last round of plaque picking, a stock of the plaque purified SKV viruses are grown in U2OS cells and used to prepare viral DNA. To confirm that our final plaque picks are the viruses of interest, the whole virus genome is analyzed by next generation sequencing. A purified population of a clone with no mutation will move a step forward in the characterization process.

### Example 2 Assessment of UL40 and K5 Activity and NK Cell Mediated Killing of Virus Infected Cells

[0288] The recombinant viruses described in Example 1 were used to determine if UL40 and K5 retain their activity in the context of VACV infection and to assess their effect on NK cell mediated killing of recombinant virus infected cells. Recombinant virus infected cells were compared to the parental SKV infected cells.

### A. Assessment of K5 and UL40 Activity in Infected HeLa Cells

[0289] In the studies, HeLa cells were used as host cells to test for NK killing. To assess if activity of UL40 and K5 is retained in infected HeLa cells, confluent and adherent HeLa cells were infected with recombinant viruses or parental SKV at an MOI of 0.1 and incubated for 18-20 hours. Infected HeLa cells were stained with antibodies directed against ICAM-I, HLA-ABC, and HLA-E to assess their surface expression. Mean fluorescence intensity (MFI) and frequency of cells positive for the surface markers were measured on virus infected cells expressing GFP by flow cytometry.

[0290] Hela cells infected with SKV-UL40 recombinant virus had increased HLA-E surface expression, with a 1.5-fold increase in HLA-E expression compared to HeLa cells infected with SKV-K5 recombinant virus and a 3-fold increase in expression compared to the parental SKV virus (FIG. 1A).

[0291] As shown in FIG. 1B, HeLa cells infected with SKV-K5 recombinant virus exhibited a drastic decrease in ICAM-1 surface expression, with approximately a 20-fold decrease in ICAM-I surface expression as determined by flow cytometry compared to the parental SKV virus infected HeLa cells.

[0292] As shown in FIG. 1C, HeLa cells infected with K5 recombinant virus also had decreased surface expression of HLA-ABC with approximately a 3-fold decrease in MFI compared to HeLa cells infected with the parental SKV virus. As expected, UL40 delivery by SKV did not impact HLA-ABC surface expression (FIG. 1C). Further, the increase in HLA-E expression shown in FIG. 1A in HeLa cells infected with SKV-K5 recombinant virus is consistent with the activity of K5 to indirectly increase HLA-E surface expression by promoting endocytosis of HLA-ABC molecules but not HLA-E.

[0293] Characterization of HeLa cells infected with SKV expressing both UL40 and K5 showed an impact on all assessed markers. HLA-E expression was increased by approximately 2-fold in HeLa cells infected with SKV-UL40_K5 recombinant virus compared to the parental SKV virus infected cells, as shown in FIG. 1A. ICAM-1 surface expression was decreased by approximately 20-fold in SKV-UL40_K5 recombinant virus infected cells compared to the parental SKV virus infected cells, as shown in FIG. 1B. HLA-ABC surface expression also was downregulated by approximately 10-fold SKV-UL40_K5 recombinant virus infected cells compared to parental SKV virus infected cells, as shown in FIG. 1C.

[0294] Together, these data clearly demonstrate that delivery of UL40 and K5, individually or together, retain their activity in the context of VACV infection. HLA-E surface expression is upregulated in cells infected with UL40 expressing VACV while MHCI molecules (HLA-ABC) and ICAM-1 are downregulated from the surface in cells infected with K5 expressing VACV. In addition, fitness analysis of UL40(+/−K5) VACV revealed no difference in comparison with VACV (data not shown).

### B. NK Cell Killing Assay

[0295] The infected HeLa cells described in the above experiments were used as target cells to assess NK cell mediated killing. The HeLa cells were labeled with cell trace violet to monitor cell proliferation and infected with either SKV, SKV-UL40, SKV-K5 or SKV-UL40_K5 as described above. All SKV viruses also expressed GFP to monitor infection. To obtain NK cells, NK cells were expanded from human peripheral blood mononuclear cells (PBMCs) for 14 days using the CellXVivo Human NK cell expansion kit (R&D Systems), then purified using the NK cell enrichment kit from Miltenyi Biotec. Purity of isolated CD56+/CD3− NK cells was assessed by flow cytometry as depicted in FIG. 2A.

[0296] The enriched NK cells were co-cultured with approximately 50,000 SKV-infected HeLa cells per well of a 96 well plate at a 5:1 ratio of effector cells to target cells and incubated at 37° C. for about 5 hours. The cells were then stained for viability and NK cell cytotoxicity and analyzed by flow cytometry.

[0297] Results indicated that NK-mediated cytotoxicity was drastically reduced in HeLa cells infected with recombinant SKV expressing UL40 and/or K5. As depicted in FIG. 2B, there was reduced NK cell killing of SKV-UL40 recombinant virus infected cells (86.16% reduction), SKV-K5 recombinant virus infected cells (98.56% reduction), and SKV-UL40_K5 recombinant virus infected cells (95.72% reduction) compared to the parental SKV infected cells. These results demonstrate that all three recombinant viruses are protected from NK cell killing and both UL40 and K5 maintain their NK cell inhibitory effect in a recombinant vaccinia virus.

### Example 3 Assessment of UL40 and K5 on CD8⁺ T Cell Mediated Killing of Oncolytic Virus Infected Cells

[0298] The recombinant viruses described in Example 1 were used to assess if UL40 and/or K5 expression by VACV can protect the infected cells from killing mediated by CD8+ T cells.

### A. Assessment of K5 and UL40 Activity in Infected MHCI Antigen-Expressing Target Cells

[0299] MeWo_MART-1 cell lines were used as target cells for infection with recombinant viruses and parental SKV for use in T cell killing assay. The MeWo cell line expresses the melanoma tumor-associated antigen MART-1 that will be presented by MHCI at the cell surface for recognition by specific MART-1-specific CD8+ T cells. MeWo cells were seeded at 40,000 cells per well (96-well plate), infected with recombinant SKV viruses (MOI 0.1), stimulated with recombinant human IFNγ (100 ng/mL), and incubated at 37° C. for 18-21 hours. A pool of virus infected MeWo_MART-1 target cells were stained with antibodies targeting HLA-ABC and HLA-E and mean fluorescence intensity (MFI) was measured on virus infected MeWo_MART-1 target cells expressing GFP using flow cytometry.

[0300] As shown in FIG. 3A, HLA-ABC surface expression is upregulated in the presence of IFNγ compared to cultures incubated without IFNγ. In both IFNγ⁺ and IFNγ⁻ cultures, the SKV-UL40 recombinant virus had no effect on HLA-ABC surface expression compared to the parental SKV on infected cells. As displayed in FIG. 3B, MeWo_MAR-1 cells infected with SKV-UL40 recombinant virus had increased expression of HLA-E in both IFNγ positive and negative cultures compared to cells infected with the parental SKV.

[0301] MeWo_MART-1 cells infected with the K5 recombinant virus had decreased HLA-ABC surface expression by up to 3-fold in cultures with and without IFNγ when compared to cells infected with the parental SKV, as shown in FIG. 3A. HLA-E expression was unaffected or moderately increased in the K5 recombinant virus infected cells compared to the parental SKV infected cells, as shown in FIG. 3B.

[0302] MeWo_MART-1 cells infected with SKV-UL40_K5 recombinant virus had decreased expression of HLA-ABC in both IFNγ⁺ and IFNγ⁻ cultures compared to cells infected with the parental SKV, as shown in FIG. 3A. SKV-UL40-K5 recombinant virus infected cells also had modest increases in HLA-E surface expression compared to cells infected with the parental SKV, as shown in FIG. 3B.

### B. CD8⁺ T Cell Killing Assay

[0303] The infected MeWo_MART-1 cells described in the above experiments were used as target cells to assess T cell mediated killing. The T cell killing assay was performed using MART-1-specific CD8+ T-cells incubated with MeWo_MART-1 cells infected with either parental SKV, SKV-UL40 recombinant virus, SKV-K5 recombinant virus, or SKV-UL40_K5 recombinant virus in the presence or absence of IFNγ as described above. All SKV viruses also expressed GFP to monitor infection. Effector T cells were incubated for 18-21 hours (overnight) in 300 IU/mL of recombinant human IL-2 before being added to infected target cells at a ratio of 3:1 effector cells to target cells. The co-culture was incubated at 37° C. while maintaining the 300 IU/mL concentration of recombinant human IL-2. After 6 hours of incubation, the co-culture was then stained for cell viability and analyzed by flow cytometry.

[0304] As displayed in FIG. 3C, in the absence of IFNγ, T cell mediated cytotoxicity was reduced in MeWo_MART-1 cells infected with the SKV-UL40 recombinant virus by 43.77% compared to the parental SKV infected cells. In the absence of IFNγ, T cell mediated cytotoxicity was also reduced in SKV-K5 recombinant virus infected cells and SKV-UL40_K5 recombinant virus infected cells by 58.78% and 46.48% respectively when compared to cells infected with parental SKV. The presence of IFNγ markedly increased T cell-mediated killing, likely by upregulating MHCI expression on the target cells. In the presence of IFNγ, CD8⁺ T cell mediated cytotoxicity was reduced in SKV-UL40 recombinant virus infected cells, SKV-K5 recombinant virus infected cells, and SKV-UL40_K5 recombinant virus infected cells by 60.04%, 80.98%, and 78.62% respectively when compared to the parental SKV infected cells.

[0305] Inhibition of CD8⁺ T cell mediated cell lysis by UL40 expressed in infected cells was unexpected, and is believed to be the first time UL40 has been demonstrated to protect virus infected cells against killing mediated by T cells. Without wishing to be bound by theory, the inhibition of T cell mediated killing by delivering UL40 to infected cells is likely due to the UL40 recombinant virus upregulation of HLA-E. It is likely that HLA-E/UL40 peptide complexes with the inhibitory receptor NKG2A/CD94 expressed on activated CD8⁺ T cells to decrease their cytotoxic activity.

[0306] Together with the results in Example 2, these data demonstrate that UL40 and/or K5 protein(s) expressed by VACV protect(s) infected cells from killing mediated by both NK and T cells. Importantly, K5 and UL40 inhibit killing mediated by NK and T cells through different mechanisms which would be expected to expand their range of action when used together. This is of particular importance in oncolytic virotherapy while targeting heterogenous tumour cells that can, in some cases, be both positive and negative for MHCI expression. Further, K5 and UL40 delivered by VACV are retained within the cell interior which restricts their protective function to the infected cells. Such recombinant VACV are suitable to be used in combination with adoptive T cell therapy, such as using autologous bulk tumour-infiltrating lymphocytes (TIL) or enriched or selected tumor reactive TILs. Recombinant VACV can be administrated prior to, concurrently with or after treatment with TIL transfer.

[0307] The present invention is not intended to be limited in scope to the particular disclosed embodiments, which are provided, for example, to illustrate various aspects of the invention. Various modifications to the compositions and methods described will become apparent from the description and teachings herein. Such variations may be practiced without departing from the true scope and spirit of the disclosure and are intended to fall within the scope of the present disclosure.

### CONCLUSION

[0308] The foregoing descriptions of various embodiments of the invention have been presented for purposes of illustration and description. It is not intended to limit the invention to the precise forms disclosed. Many modifications, variations and refinements will be apparent to practitioners skilled in the art. For example, embodiments of the combination of oncolytic virus and TIL therapy can be adapted for a number of cancers including solid tumors such as GI, breast, bone, colorectal, and melanomas and various liquid tumors such as leukemia. Also, those skilled in the art will recognize, or be able to ascertain using no more than routine experimentation, numerous equivalents to the specific devices and methods described herein. Such equivalents are considered to be within the scope of the present invention and are covered by the appended claims below.

[0309] Elements, characteristics, or acts from one embodiment can be readily recombined or substituted with one or more elements, characteristics or acts from other embodiments to form numerous additional embodiments within the scope of the invention. Moreover, elements that are shown or described as being combined with other elements, can, in various embodiments, exist as standalone elements. Further still, embodiments of the invention also contemplate the exclusion or negative recitation of an element, feature, chemical, therapeutic agent, characteristic, value or step wherever said element, feature, chemical, therapeutic agent, characteristic, value, step or the like is positively recited. Hence, the scope of the present invention is not limited to the specifics of the described embodiments, but is instead limited solely by the appended claims.

What is claimed is:

1. A nucleic acid comprising a recombinant Orthopoxvirus genome and one or more transgenes comprising (a) a nucleotide sequence encoding UL40 and/or (b) a nucleotide sequence encoding K5.

2. The nucleic acid of claim 1, wherein the recombinant Orthopoxvirus genome is derived from a Vaccinia virus genome.

3. The nucleic acid of claim 2, wherein the Vaccinia virus genome is derived from a genome of a Copenhagen strain of Vaccinia virus.

4. The nucleic acid of any of claims 1-3, wherein the Orthopoxvirus genome comprises:
(a) deletions in one or more of the following genes: C2L, C1L, N1L, N2L, MIL, M2L, K1L, K2L, K3L, K4L, K5L, K6L, K7R, F1L, F2L, F3L, B14R, B15R, B16R, B17L, B18R, B19R, and B20R;
(b) deletions in one or more of the following genes in the 3′ inverted terminal repeat (ITR): B21R, B22R, B23R, B24R, B25R, B26R, B27R, B28R, and B29R; and/or
(c) deletion in the B8R gene.

5. The nucleic acid of any of claims 1-4, wherein the Orthopoxvirus genome comprises:
(a) deletions in the following genes: C2L, C1L, N1L, N2L, M1L, M2L, K1L, K2L, K3L, K4L, K5L, K6L, K7R, F1L, F2L, F3L, B14R, B15R, B16R, B17L, B18R, B19R and B20R;
(b) deletions in the following genes in the 3′ inverted terminal repeat (ITR): B21R, B22R, B23R, B24R, B25R, B26R, B27R, B28R and B29R; and
(c) deletion in the B8R gene.

6. The nucleic acid of claim 4 or claim 5, wherein the deletions in the C2L, F3L, B14R, and B29R vaccinia genes are partial deletions.

7. The nucleic acid of any of claims 1-6, wherein the Orthopoxvirus genome has at least 95% sequence identity to SEQ ID NO 15.

8. The nucleic acid of any of claims 1-6, wherein the Orthopoxvirus genome has the sequence set forth in SEQ ID NO 15.

9. The nucleic acid of any of claim 1-8, wherein the Orthopoxvirus genome comprises a nucleotide sequence encoding UL40.

10. The nucleic acid of any of claims 1-8, wherein the Orthopoxvirus genome comprises a nucleotide sequence encoding K5.

11. The nucleic acid of any of claims 1-8, wherein the Orthopoxvirus genome comprises (a) a nucleotide sequence encoding UL40 and (b) a nucleotide sequence encoding K5.

12. The nucleic acid of any of claims 1-11, wherein the nucleotide sequence encoding UL40 encodes an amino acid sequence with at least 95% sequence identity to SEQ ID NO 3.

13. The nucleic acid of any of claims 1-12, wherein the nucleotide sequence encoding UL40 encodes the amino acid sequence set forth in SEQ ID NO 3.

14. The nucleic acid of any of claims 1-13, wherein the nucleotide sequence encoding UL40 comprises a sequence with at least 95% sequence identity to SEQ ID NO 1.

15. The nucleic acid of any of claims 1-14, wherein the nucleotide sequence encoding UL40 comprises the sequence set forth in SEQ ID NO 1.

16. The nucleic acid of any of claims 1-15, wherein the nucleotide sequence encoding UL40 is operably linked to a vaccinia virus early/late promoter.

17. The nucleic acid of any of claims 1-16, wherein the nucleotide sequence encoding K5 encodes an amino acid sequence with at least 95% sequence identity to SEQ ID NO 6.

18. The nucleic acid of any of claims 1-17, wherein the nucleotide sequence encoding K5 encodes the amino acid sequence set forth in SEQ ID NO 6.

19. The nucleic acid of any of claims 1-18, wherein the nucleotide sequence encoding K5 comprises a sequence with at least 95% sequence identity to SEQ ID NO 2.

20. The nucleic acid of any of claims 1-19, wherein the nucleotide sequence encoding K5 comprises the sequence set forth in SEQ ID NO 2.

21. The nucleic acid of any of claims 1-20, wherein the nucleotide sequence encoding K5 is operably linked to a vaccinia virus early/late promoter.

22. The nucleic acid of any of claims 1-21, wherein the one or more transgenes comprises at least one further transgene comprising a nucleotide sequence encoding an immunomodulatory protein selected from the group consisting of a checkpoint inhibitor, an interleukin, a cytokine and an NK cell and/or T cell inhibitor.

23. The nucleic acid of claim 22, wherein the immunomodulatory protein is FMS-like tyrosine kinase 3 ligand (FLT3L), an antibody that specifically binds CTLA-4, or an Interleukin 12 (IL-12) polypeptide, optionally wherein the IL-12 polypeptide is a membrane-bound IL-12.

24. The nucleic acid of claim 22 or claim 23, wherein the nucleotide sequence encoding the at least one further transgene is operably linked to a vaccinia virus early/late promoter.

25. The nucleic acid of any of claims 16, 21 and 24, wherein the vaccinia virus early/late promoter is selected from H5R, P7.5, and E3L or is selected from SEQ ID NO:4, SEQ ID NO: 5, and SEQ ID NO: 14.

26. The nucleic acid of any of claims 1-25, wherein the one or more transgenes is inserted into locus 5p of the recombinant Orthopoxvirus genome between C2L and F3L.

27. The nucleic acid of any of claims 1-26, wherein the one or more transgenes are in the same orientation as endogenous Orthopoxvirus genes within the recombinant Orthopoxvirus genome.

28. The nucleic acid of any of claims 1-9 and 11-27, wherein expression of UL40 increases HLA-E surface expression in a host cell infected by a recombinant Orthopoxvirus comprising the nucleic acid.

29. The nucleic acid of any of claims 1-8 and 10-27, wherein expression of K5 decreases HLA-ABC surface expression on a host cell infected by a recombinant Orthopoxvirus comprising the nucleic acid.

30. The nucleic acid of any of claims 1-8 and 10-27, wherein the expression of K5 decreases ICAM-1 surface expression on a host cell infected by a recombinant Orthopoxvirus comprising the nucleic acid.

31. The nucleic acid of any of claims 1-30, wherein host cells infected by a recombinant Orthopoxvirus comprising the nucleic acid. are killed by lymphocytes at a reduced rate in comparison to cells infected with a reference recombinant Orthopoxvirus that has a similar genome but does not comprise a nucleotide sequence encoding either UL40 or K5.

32. The nucleic acid of any of claims 1-31, wherein host cells infected by a recombinant Orthopoxvirus comprising the nucleic acid are killed by NK cells at a reduced rate in comparison to cells infected with a recombinant Orthopoxvirus that has a similar genome but does not comprise a nucleotide sequence encoding either UL40 or K5.

33. The nucleic acid of any of claims 1-32, wherein host cells infected by a recombinant Orthopoxvirus comprising the nucleic acid are killed by T cells at a reduced rate in comparison to cells infected with a recombinant Orthopoxvirus that has a similar genome but does not comprise a nucleotide sequence encoding either UL40 or K5.

34. A recombinant Orthopoxvirus encoded by the nucleic acid of any of claims 1-33.

35. A pharmaceutical composition comprising the recombinant Orthopoxvirus of claim 34 and a physiologically acceptable carrier.

36. A method of treating cancer comprising administering the recombinant Orthopoxvirus of claim 34 to a subject

37. A method of treating cancer comprising administering the pharmaceutical composition of claim 35 to a subject

38. The method of claim 36 or claim 37, wherein the subject is human.

39. The method of any of claims 36-38, further comprising administering a second therapeutic agent for the treatment of cancer.

40. The method of claim 39, wherein the second therapeutic agent is administered before, concurrently with or after administering the pharmaceutical composition or recombinant Orthopoxvirus.

41. The method of claim 39 or claim 40, wherein the second therapeutic agent is an autologous tumor infiltrating lymphocyte (TIL) therapy.

42. The method of claim 41, wherein the pharmaceutical composition or recombinant Orthopoxvirus is administered to the subject prior to harvesting the TILs from a tumor from the subject for producing the autologous TIL therapy.

43. The method of claim 39 or claim 40, wherein the second therapeutic agent is CAR T cell therapy.

44. The method of claim 39 or claim 40, wherein the second therapeutic agent is a checkpoint blockade immunotherapy.

45. The method of claim 44, wherein the checkpoint blockade immunotherapy is a PD1 and/or a PD-L1 inhibitor.

46. The method of claim 39 or claim 40, wherein the second therapeutic agent is an immunomodulatory agent.

47. The method of claim 46, wherein the immunomodulatory agent is a CD47 inhibitor.

48. The method of claim 46, wherein the immunomodulatory agent is an NKG2A inhibitor.

The application's sequence listing, which the Patent Office published only in electronic form, follows.

SEQUENCE LISTING (45 sequences)

SEQ ID NO: 1 - DNA, 666 bp, synthetic construct
  misc_feature 1..666: note = UL40 (nucleotide)
  source 1..666: mol_type = other DNA
atgaacaagttctctaataccagaatcggcttcacctgcgccgtgatggcccctagaaccctgattctgacagtcggcctgctgtgcatgagaatccggtccctgctctgtagccccgccgagacaaccgtgaccaccgccgctgttacatctgctcacggccctctgtgcccactggtgttccagggctgggcctacgccgtctaccaccaaggagatatggccctgatgacactggacgtgtactgctgccggcagacaagcaacaacaccgtggtggccttctcccaccatcctgccgacaacacactgctgatcgaggtgggcaacaatactcgcagacacgtggacggcatctcttgccaggaccatttcagagcccagcaccaggattgccccgctcagaccgtgcacgtgcggggcgtgaacgagagcgcctttggcctgacccacctgcaaagctgttgtctgaacgaacacagccaactgagcgagagagtggcatatcacctgaagctgagacctgccaccttcggactggaaacctgggctatgtacaccgtgggcatcctggccctcggcagcttttctagcttctactcccagatcgccagaagcctgggagtgctgcctaacgaccaccactacgccctgaaaaaggcctga

SEQ ID NO: 2 - DNA, 771 bp, synthetic construct
  misc_feature 1..771: note = K5 (nucleotide)
  source 1..771: mol_type = other DNA
atggcctccaaggacgtggaagagggcgttgagggccccatctgctggatctgccgggaagaggtgggaaatgagggtattcacccctgcgcctgcaccggcgagctggacgtggtgcaccctcaatgtctgtctacatggctgaccgtgtccagaaacaccgcctgtcagatgtgcagagtgatctatagaacaagaacccagtggcggagcagactgaacctgtggccagaaatggaaagacaggaaatcttcgagctgttcctgctgatgagcgtggtggtcgccggactggtgggagtggccctgtgtacctggaccctgctggtcatcctgacagcccctgctggcacattcagccccggcgccgtgctgggcttcctgtgcttcttcggcttttaccaaatcttcatcgtgttcgccttcggcggcatctgccgggtcagcggcaccgtgcgggccctgtacgccgccaacaacacaagagtgaccgtgctcccctaccggagacctagaaggcctacagctaatgaagataacatcgagctgaccgtgctggtgggccctgccggcggaaccgatgaggaacccaccgacgagagcagcgagggcgacgtggccagcggcgataaggaacgggacggcagctctggcgacgagcctgacggcggccctaacgacagagccggcctgcgcggaaccgctagaaccgacctgtgcgctcctaccaagaaacctgtgcggaagaaccacccaaagaacaacggctga

SEQ ID NO: 3 - protein, 221 aa, synthetic construct
  REGION 1..221: note = UL40 (aa)
MNKFSNTRIGFTCAVMAPRTLILTVGLLCMRIRSLLCSPAETTVTTAAVTSAHGPLCPLVFQGWAYAVYHQGDMALMTLDVYCCRQTSNNTVVAFSHHPADNTLLIEVGNNTRRHVDGISCQDHFRAQHQDCPAQTVHVRGVNESAFGLTHLQSCCLNEHSQLSERVAYHLKLRPATFGLETWAMYTVGILALGSFSSFYSQIARSLGVLPNDHHYALKKA

SEQ ID NO: 4 - DNA, 185 bp, synthetic construct
  misc_feature 1..185: note = H5R promoter (nucleotide)
  source 1..185: mol_type = other DNA
ttaaagttacaaacaactaggaaattggtttatgatgtataatttttttagtttttatagattctttattctatacttaaaaaatgaaaataaatacaaaggttcttgagggttgtgttaaattgaaagcgagaaataatcataaattatttcattatcgcgatatccgttaagtttgtatcgta

SEQ ID NO: 5 - DNA, 149 bp, synthetic construct
  misc_feature 1..149: note = P7.5 promoter (nucleotide)
  source 1..149: mol_type = other DNA
tcactaattccaaacccacccgctttttatagtaagtttttcacccataaataataaatacaataattaatttctcgtaaaagtagaaaatatattctaatttattgcacggtaaggaagtagatcataactcgacataacttcgtata

SEQ ID NO: 6 - protein, 256 aa, synthetic construct
  REGION 1..256: note = K5 (aa)
MASKDVEEGVEGPICWICREEVGNEGIHPCACTGELDVVHPQCLSTWLTVSRNTACQMCRVIYRTRTQWRSRLNLWPEMERQEIFELFLLMSVVVAGLVGVALCTWTLLVILTAPAGTFSPGAVLGFLCFFGFYQIFIVFAFGGICRVSGTVRALYAANNTRVTVLPYRRPRRPTANEDNIELTVLVGPAGGTDEEPTDESSEGDVASGDKERDGSSGDEPDGGPNDRAGLRGTARTDLCAPTKKPVRKNHPKNNG

SEQ ID NO: 7 - protein, 727 aa, synthetic construct
  REGION 1..727: note = CTL4 (aa)
METDTLLLWVLLLWVPGSTGQVQLVESGGGVVQPGRSLRLSCAASGFTFSSYTMHWVRQAPGKGLEWVTFISYDGNNKYYADSVKGRFTISRDNSKNTLYLQMNSLRAEDTAIYYCARTGWLGPFDYWGQGTLVTVSSASTKGPSVFPLAPSSKSTSGGTAALGCLVKDYFPEPVTVSWNSGALTSGVHTFPAVLQSSGLYSLSSVVTVPSSSLGTQTYICNVNHKPSNTKVDKRVEPKSCDKTHTCPPCPAPELLGGPSVFLFPPKPKDTLMISRTPEVTCVVVDVSHEDPEVKFNWYVDGVEVHNAKTKPREEQYNSTYRVVSVLTVLHQDWLNGKEYKCKVSNKALPAPIEKTISKAKGQPREPQVYTLPPSRDELTKNQVSLTCLVKGFYPSDIAVEWESNGQPENNYKTTPPVLDSDGSFFLYSKLTVDKSRWQQGNVFSCSVMHEALHNHYTQKSLSLSPGKPRGSGEGRGSLLTCGDVEENPGPKLMAWTPGIFMVLSYLTGSFSEIVLTQSPGTLSLSPGERATLSCRASQSVGSSYLAWYQQKPGQAPRLLIYGAFSRATGIPDRFSGSGSGTDFTLTISRLEPEDFAVYYCQQYGSSPWTFGQGTKVEIKRTVAAPSVFIFPPSDEQLKSGTASVVCLLNNFYPREAKVQWKVDNALQSGNSQESVTEQDSKDSTYSLSSTLTLSKADYEKHKVYACEVTHQGLSSPVTKSFNRGEC

SEQ ID NO: 8 - DNA, 2184 bp, synthetic construct
  misc_feature 1..2184: note = CTL4 (nucleotide)
  source 1..2184: mol_type = other DNA
atggaaacagacaccctattattatgggttttgcttctatgggtgccaggatctacgggtcaggttcagctagtcgaatcgggtggaggagtcgtgcagccgggacgttccttacgtttatcttgcgcagcgtctggttttactttctcgtcctacactatgcattgggttcgtcaggctccgggaaagggattggagtgggtaacatttataagttacgacggtaataataaatactatgcagacagtgtgaagggacgtttcactatatctcgagataatagtaagaacactttgtatttgcagatgaattcattgagagcggaagatacagcaatttactactgcgccagaaccggatggttgggtccctttgactattggggacagggtactcttgttacggtgtcttctgcttcaacaaagggtccctctgtcttcccgcttgcgccctcatcaaaatcgacgtcgggtggaaccgctgccttgggatgcttggttaaggactatttccccgaacctgtcaccgtgtcttggaattccggtgctctaacgtctggtgtgcacactttccctgccgttttacaaagttccggactatattcactttcgtccgtagtaactgttccaagttcgtcccttggaacacagacctatatatgcaacgtaaaccacaaaccctccaataccaaagtcgataaaagagttgagcctaaatcctgcgacaaaacacacacctgcccaccttgcccggcccctgaacttcttggaggaccatctgtattccttttcccaccgaagcctaaggacaccttgatgatatccagaactcccgaagtcacgtgcgtagtagtcgatgtgagtcacgaagatccggaagtcaagtttaactggtatgtagacggagtagaggttcataacgccaagaccaagccaagagaagaacaatataactcgacttacagagtcgtgtctgtattaaccgtcttgcatcaggactggttaaacggtaaagagtacaagtgcaaggtctccaataaagccctacctgcccccatcgaaaaaaccatatccaaggctaagggtcagcctagagaacctcaagtttacacattaccgcccagtagagatgaacttacgaagaatcaagtgagtctaacctgccttgttaaaggattctaccccagtgacatagcggtggagtgggagtccaacggtcaacccgagaacaattataagacgacaccgcccgttcttgacagtgacggatcgttctttctatactctaagttgactgtggataaatcccgatggcagcagggaaacgtattctcttgctcagtgatgcatgaggcgttgcacaatcattacacccaaaagtctttgtcgctaagtccaggtaaaccgcggggcagcggagagggcagaggaagcctgctgacttgtggcgatgtggaagagaaccctggccctaagcttatggcttggacaccaggaatcttcatggtacttagttacttgacaggatctttctcggaaatagtcttaactcagtcaccgggtacactttccctttcgcccggagagcgtgcgaccctatcgtgtcgagcttcccagtcggttggttcttcgtatcttgcttggtatcagcagaagcccggacaagctcctcgtcttttgatctacggtgcgttttcgagagcgactggtatcccggatagattttctggatcgggttctggtactgatttcactttaacgatttcgagactagagcccgaagattttgctgtgtattattgccagcaatatggatctagtccgtggacgttcggtcagggtaccaaggtcgagataaaaagaactgtggccgcaccctccgtgtttatctttcccccttccgacgaacagctaaagtcgggtactgcatcggtggtatgtttacttaacaacttttacccacgagaggccaaggtacaatggaaggtggataacgccttacaatcaggaaactcacaagagtccgtcaccgagcaagattccaaggacagtacatactcgttatcctcgacattaacattgagtaaggcggattatgagaagcataaggtttacgcatgcgaagtgacgcaccaaggactttcatcccccgtcaccaagtctttcaatcgtggtgagtgctga

SEQ ID NO: 9 - protein, 260 aa, synthetic construct
  REGION 1..260: note = IL-12 p35(aa)
MCPARSLLLVATLVLLDHLSLARNLPVATPDPGMFPCLHHSQNLLRAVSNMLQKARQTLEFYPCTSEEIDHEDITKDKTSTVEACLPLELTKNESCLNSRETSFITNGSCLASRKTSFMMALCLSSIYEDLKMYQVEFKTMNAKLLMDPKRQIFLDQNMLAVIDELMQALNFNSETVPQKSSLEEPDFYKTKIKLCILLHAFRIRAVTIDRVMSYLNASGGGGSGGGGSGGGGSLLPSWAITLISVNGIFVICCLTYCFA

SEQ ID NO: 10 - DNA, 783 bp, synthetic construct
  misc_feature 1..783: note = IL-12 p35(nucleotide)
  source 1..783: mol_type = other DNA
atgtgtcccgcgcgatcgttattgttagttgcgacgttggtcctacttgaccatctatcactagcgcgtaatttgcccgttgccacaccagatcccggaatgtttccttgcttacatcatagtcagaacttacttcgtgcagtctccaacatgttacagaaagcccgacagaccttagagttctatccctgtacttccgaagagatagatcacgaggacataacgaaagacaaaacatcgaccgttgaagcgtgcttacccttagaactaaccaaaaatgaaagttgtctaaactctagagaaacgagttttatcaccaatggaagttgcttggcgtctagaaaaacatcatttatgatggccttgtgtctttcctccatatacgaggacttgaagatgtatcaggtcgagttcaagacaatgaacgcgaaattgcttatggaccccaaacgacagatatttttggaccaaaacatgttagctgttatagacgaattgatgcaggcgctaaacttcaattcggaaactgtgccacagaagtcatccttagaggagcccgatttttacaagacaaaaatcaagttatgcattcttcttcacgcgtttagaattcgtgccgttacgattgatagagtaatgtcgtacttgaatgcgtcgggtggaggaggttccggaggaggaggatccggaggaggtggatccttacttccttcgtgggctataacattaatctccgttaatggtatcttcgtgatttgctgtctaacatactgctttgcatga

SEQ ID NO: 11 - protein, 328 aa, synthetic construct
  REGION 1..328: note = IL-12 p40 (aa)
MCHQQLVISWFSLVFLASPLVAIWELKKDVYVVELDWYPDAPGEMVVLTCDTPEEDGITWTLDQSSEVLGSGKTLTIQVKEFGDAGQYTCHKGGEVLSHSLLLLHKKEDGIWSTDILKDQKEPKNKTFLRCEAKNYSGRFTCWWLTTISTDLTFSVKSSRGSSDPQGVTCGAATLSAERVRGDNKEYEYSVECQEDSACPAAEESLPIEVMVDAVHKLKYENYTSSFFIRDIIKPDPPKNLQLKPLKNSRQVEVSWEYPDTWSTPHSYFSLTFCVQVQGKSKREKKDRVFTDKTSATVICRKNASISVRAQDRYYSSSWSEWASVPCS

SEQ ID NO: 12 - DNA, 987 bp, synthetic construct
  misc_feature 1..987: note = IL-12 p40 (nucleotide)
  source 1..987: mol_type = other DNA
atgtgccatcagcagctggtgattagctggtttagcctggtgtttctggcgagcccgctggtggcgatttgggaactgaaaaaagatgtgtatgtggtggaactggattggtatccggatgcgccgggcgaaatggtggtgctgacctgcgataccccggaagaagatggcattacctggaccctggatcagagcagcgaagtgctgggcagcggcaaaaccctgaccattcaggtgaaagaatttggcgatgcgggccagtatacctgccataaaggcggcgaagtgctgagccatagcctgctgctgctgcataaaaaagaagatggcatttggagcaccgatattctgaaagatcagaaagaaccgaaaaacaaaacctttctgcgctgcgaagcgaaaaactatagcggccgctttacctgctggtggctgaccaccattagcaccgatctgacctttagcgtgaaaagcagccgcggcagcagcgatccgcagggcgtgacctgcggcgcggcgaccctgagcgcggaacgcgtgcgcggcgataacaaagaatatgaatatagcgtggaatgccaggaagatagcgcgtgcccggcggcggaagaaagcctgccgattgaagtgatggtggatgcggtgcataaactgaaatatgaaaactataccagcagcttttttattcgcgatattattaaaccggatccgccgaaaaacctgcagctgaaaccgctgaaaaacagccgccaggtggaagtgagctgggaatatccggatacctggagcaccccgcatagctattttagcctgaccttttgcgtgcaggtgcagggcaaaagcaaacgcgaaaaaaaagatcgcgtgtttaccgataaaaccagcgcgaccgtgatttgccgcaaaaacgcgagcattagcgtgcgcgcgcaggatcgctattatagcagcagctggagcgaatgggcgagcgtgccgtgcagctga

SEQ ID NO: 13 - DNA, 720 bp, synthetic construct
  misc_feature 1..720: note = GFP (nucleotide)
  source 1..720: mol_type = other DNA
atggtgagcaagggcgaggagctgttcaccggggtggtgcccatcctggtcgagctggacggcgacgtaaacggccacaagttcagcgtgtccggcgagggcgagggcgatgccacctacggcaagctgaccctgaagttcatctgcaccaccggcaagctgcccgtgccctggcccaccctcgtgaccaccctgacctacggcgtgcagtgcttcagccgctaccccgaccacatgaagcagcacgacttcttcaagtccgccatgcccgaaggctacgtccaggagcgcaccatcttcttcaaggacgacggcaactacaagacccgcgccgaggtgaagttcgagggcgacaccctggtgaaccgcatcgagctgaagggcatcgacttcaaggaggacggcaacatcctggggcacaagctggagtacaactacaacagccacaacgtctatatcatggccgacaagcagaagaacggcatcaaggtgaacttcaagatccgccacaacatcgaggacggcagcgtgcagctcgccgaccactaccagcagaacacccccatcggcgacggccccgtgctgctgcccgacaaccactacctgagcacccagtccgccctgagcaaagaccccaacgagaagcgcgatcacatggtcctgctggagttcgtgaccgccgccgggatcactctcggcatggacgagctgtacaagtaa

SEQ ID NO: 14 - DNA, 55 bp, synthetic construct
  misc_feature 1..55: note = E3L promoter (nucleotide)
  source 1..55: mol_type = other DNA
aaaaatgataaagtaggttcagttttattgctggttgtgttagttctctctaaaa

SEQ ID NO: 15 - DNA, 156903 bp, synthetic construct
  misc_feature 1..156903: note = Parental SKV
  source 1..156903: mol_type = other DNA
tcagacacacgctttgagttttgttgaatcgatgagtgaagtatcatcggttgcaccttcagatgccgatccgtcgacatacttgaatccatccttgacctcaagttcagatgattccttgcacatgtctccgatacgaacgctaaactctagattcttgacacattttgtatcgacgatcgttgaaccgatgatatcttcgtaactcactttcttatgagagatgttagacccgagtactggatgggtcttgatgtcgctgtctttctcttcttcgctacatctgatgtcgatagacacctcacagtctttgatcatagccagagcttcttcacgagtgatcgcgggagagtccttaccttgtcctggggacacgctggacaatctagcattcactgtgtttccatcagcggattctgagatggatttaatctgaggacatttggtgaatccaaagttcattctcagacctccaccgatgatggagtaataagtggtaggaggatctacatcctcgactgatgtggaatcatcttctgattccacctcgggatctggatctgactcggactctgtaatttccgttacggattggcaaatcttatcattggtcggtgtttggtcttgctttgtgactttgataataacatcgattcccatatgatgtttgttttcttcttccgtacacgaggaggaggatgaggatgattgctgaagactggcaggcacatgcatgccaggacgatatattgtttcataattgctattgattgagtactgttctttatgattctacttccttaccatgcaataaattagaatatattttctacttttacgagaaattaattattgtatttattatttatgggtgaaaaacttactataaaaagcgggtgggtttggaattagtgatcagtttatgtatatcgcaactaccgggcatatggctatcgacatcgagaacattacccacatgataagagattgtatcagtttcgtagtcttgagtattggtattactatatagtatatagatgtcgacgctagatatacagtctccgaatgcggcatgataccgtcatcattctttgctttcgttaactgtttggaggaagaatctttgttattgcatttaatctcgaaattcagagtgcacacctttctcctgtaaagaatcctgaagtcgctaccttattaagaacggagaagtatccatcacgaaatacgggattacagtctttatgattcatagtaatagttagttccgacgttgagatggattcactgagaccggtagtggtcgtccgagtacacgacgtgtcgttgacgggatacagattaatttccacatcgatatagttaaaggtatttctgggtacgggttcgcatttatctgcggaagagacggtgtgagaatatgttccgagaccacacggagaacagatgacgtctccggatactccgtatcctattccacattttgtttgggaaacacatgccttgcatccggatgatcctttgagaagacaataatatccgggagagcattcacagattctattgtgagtagtgttacacgatcgcgtcttccgttacaacttagacaagcgggtaaatgattattgcgagatgtgaaggtacccgaaccacacggcgtacattgtgtgttagtcttgctatcgcataatctggaagcgtatgttcccggacacaaattatggcgtttgtattcgttgtctttacactttccatcggatggtgcatgcggtgctatatctcttccgtttattattatacatgagagaaacaatatatacgagtataatacggacttcataatttaataatgtagtaatcgttgtcgtgttcctgtttcctacttctccaatcatatagatattttctttctatcatggataatatttgtaatggttctttccgtacaacatactgtttagatgatattgcgcataatttccggaggcaaatacgatagtctagattgaccgatggtagactctaatttattgagtgctttgtcgacgagtttacttttacgctccatcgatagatggcactgttctatgagatcgtcgtacatgggaaatgaaatgtgtctgtccgaatgtatggcttcaagatagctgtgataccgtatacaggtcggtgtcggagattcgaatctctttgaggcgacttatgtcacgatgatggaatctatcttatcgaatgatatatttttcataaatacacttttatagtcctcgtttaaacagaatttactatgtagttccgcgaatgactcgtcccttaataggcagtaggctagtatcttttttacgtagtaatcgtcgtagggagagaattctgacatcttgtagaacaacgatttaatcataggtagagatactttcagtctgtggtggatgatgtcattcacaacatccgccttgtatatgatgtttctgttttcaaacaccaagtcgaataccgtctttagtcggaaggttgatgtcgtatccgatgtatgaggcaacattgttgttacaattttgaaaggcggtattatagtattcgtctttctgaatgtcgaacctatctagtagataccgtagtatattgagagtgtatccttgattatgttttatgaatagataaagtagatgttgtccttcttccttttgttcgtgccaattgagtaacattatgagaatatgacctgttgcacaatcgttccatgatgggtgtacaatcaagattattacgtatcctcgagataaaagagcatacaccacacgaggactatgtttggtatactgttgaaggtaagtgtgtaaccgcgttaatgtttgctccataatctattatcgcgtagatgaatcgcttctcggctcgcatcttagtgtgacttaacttgtaataattgcttttgtagaacgtggatatgtgtttacagtagtaatgaagagaagtgagttcatcctcgtcggcgcaattagggtcggatcctttgtacagaacgtagtagtttaagctcccattgaatttatatctaagataacacagcaatagatcggatgatttactaaagtcatcaatggtgtccgttagtatatcaaagatcttgttatcgattgatagtgaatgaatcagatagtggtgtcctttttcatccttgctatcaaagttacgcatgccgtggtgtaacaatatctttaatacagatggattaaatcgtgtattcatcgtatagcaatgtaatggagagttacctcgtttattcagatcgcagtgtttaataactagcttaaacagatgagacgatgtatccacatcaaagaacgtaaaatacatatgacaaacattgttgacagaaacgtgaccttcattcttaccgtcgtccataaatacgttaggtatgtaccacatactgtcgcgaacgatgctcacaatctcgtccatctcgcccatctcatacatttcatcatttactttttcataattagagatgtacgaaagaaaaagaaaaagaaaaagaaaaacagaacaatatatttttttagtaatgtttatgcgagacatataaaataaactccgtgtttatgatgccggtaaatgtttttatcatcttggacggaatcgattttgtaatatgtcatggaaacaaatgaaacaggacattatcactccatgataaattatttaatggagtaataaagtatctccatgggtaatttcgaaatcaagttatcgtctgtattaatgttgtccactatggagtcgatcctctcactgttctttacagtttctgtaatgatggacgttagttcttttttgtaccatttgatgtcggattctttgcgtatctcagtctgtggcgtttgcttcgtttaaataatatatcaaacatggagacgcctgatatgtaggcattcttcattctattaatgtctactctatagcgctttagttccttatgatgaccggcgatatcatacttactttagaaggaaaatcatcatctaggattaaggcgtatctgatacaggcgaataatggttcaggatatagatagcgtatatctctattaaatgcgtcaatcatagtctctagagtgggatggtagctaagtaataaatcaactatcctcgttttgttttctctttggtaactgcttttctggatggccgtattgattatcgagcgtgatgttgtaacactcgctccatattccaataaccgctttgcaaattgtatattattgacatcgaccgcgtaatatagtagagttttattctcattatcgatcatatctatatcatccatgtacttgcttagtatatcaaatacatctattagtatggtttcataacagtgatacccgcaattattaaatctcgataatatcagaccgtacatacatagacggccattgttagatatgtgatttacagccgcgtgtccatattttccacgataaaccttacgacgtttacatcgacgagattattattaacaaagtagtcgtgcagaggatagttgttgtccgttatctaacatgcatcgaacgaccatatcgccgtaatgtaagtagtttatcaacatggcttgtacgatggattcatcctgttgtctaaatctctttagaatgttatcgatgatgtagtggttatattctctggaatcgtacgaagtaatactacgcattacgtcgacaagagtatgacgtctctcaataagaagattaacgatttccatgtctacattatatggggttactctaaatcgcttgtttagataatacgcctctaatatagggctgacgtcgtatactctacacgtgtccacatcctttattaataataatttaacaatctctatatctatggttgagaaagaccagtagtattggatgggtaaagatcctccttcgtctctgccatggatggaaacattgttattgatcaaacatttaattacatccttggatagagattgagattctctatgagacgatatatagtaatgaagagagttcttacacatatcactgttgtacatacaggtacgaaatacgtaaccggtgctgtaacattctgatttaagaagccatagcaatacttctggtctcggattaggcgtcgttacgtatatatccaccaatccgagaccattgattgcataattcgtattcttggacggacgtatccgtttatccacaattaggtattttagcagacgtaagtcgatattatccgaagacagatcgaaatcatttatattcgacttgagttcgttagaggaattcgaatagctggatatcagtagatgcacaatctgagattttacgtatctatgcttactgtatgctcctagcggagttaatccttcgttgtttctacaaagtctctcgactccgcgagagagtaacagtcgaacaatcttaatgtctgtatcgcatttattggagacgtaacaatgtagcgcattgtttcctcgtctatctatatgttttgataagttgtgacacgtttcaatctctagttttatttttttgtacgtcacatcttcatccagtagacgacatagaatagtgcactctctaccacaataatccatagctattctggtgctaattattcctatttcacgaaaaatgatgaaggcaatcattcctcataagatgataaaaagtgtagtgagagagcatgaaggagatttagtatttagcagtgcggatatgatccaagagggtgagatagtcgttctcgttcagaatctttcgcagcataagtagtatgtcgatatacttatcgttgaagactcttccagagacgatagctgattgagtacaaagtccaatgattgcacgaagttcttcggcggttttcatggagtcatttctgatgaaacatttaatgatctccacgcaattgtcgatattgtcccacggaagtgaatccttcaactcaccaccaaagagctccgttgcatcagttctgaaagagatgagaagcctgtagagagaccctgcgctttctctatgggtccatctatgagaaacccacaggatgtattcagtcagacaatgtctgacgtcggccacggtattcagggagtccttagtagcgtggcaatgacagggtctgaactgggcacaaggaaaggccattgtaaaggtagacctgtagccgtttatgctaatagagggctttaatttccatttttttaatgggttgtggatgaggaatgagagtgatatcatattgagatacgtagttatgtagaggtgtatttcctatattatttactttcggtttcatattttaccaactctttaataaatttcttttcacgatgcatcttattgaatgacgttttctcataagtggacatatagatgcagaagtaatgaagaaaagtattacctctatcatctacataattagggtctgctcctttttttaacaacttatacagtacgtagtagtagtttatcggttttaaatcaagtctagaatatatagtggattaatatatttttatattagctaaagctatctatactatcagaaagcatatcattctcaacttcatcatgagttaaatatttgtgtaatggatgtcatgaacattaaacgtattcatgacatactcctttaataggttttttaaaacagatgattcaaatccttcattcattagataacagtgtaacggagtcgtaccttctactagtttgtttatatcacagcattctacaaacagtctaaacaatagagaagacggacagactttaacgtataaatgacacatgttatcgatattcgttgatgaattattattaaacgtagttatgataaatgattctaacgacatctctcgctagagataaaatctagtatcgtatcattaaacatctttgcatcatactcgcatagcatagtttttcataattaatacaatatttaaaagacttattcggaaagtattttaatacatgtatcatcgatggagatccatatgaggagtcacttgtagttcttcagtagtaataacagtgctatcatcgatagtataattatatgtagaaggttcatatgttgttgtaattggagtaactgttggtagttcttccgtggaatcaataattatactaacagcaatagtataattatataaatatgttccgttgatatcacatattttaatgaactcatttctaacaccctcagctatatctgtccaattaaatgtagccaacaatctactacgttctctttgattgactacttgtacggtagcgacgctacactatctttattgtcttctacatgctccaattgaatgtcatgatacaacgcagtttttcttatgcatgtttcataacaccacgaacatgtcgcagtaagatatatagccagagataatttctgtaaattcatgattgccggtcataaacaagcccgtcaataattgtggctatatattcagtttatagagcaaaataattaagcacaatagcgcttaatctcaaaatatgttatgtttatttttttcatattaaacatactggttaaaatcctctaaaggctgatcttcatctataaatcaagatcataattacatttagacagtggtttcatgtttataaaaatgttctttttgtgtgaataaggaatatactaatcaataatcaaccatcgaccccattacgatagtatgcaggcaaccccccattagagaggtacgtgtaatcagtctctccagttttagtatttttataagtcattgttacataaacggcttttaaacagtctcctcgataataagccatatctggaaatttattaaatactcgagtcattttacgcacggtcaaaaaagtaagtaatgtcgacgacttcttacattctatagaaacacctagaatactcattttcttttggaaaatatcctcagactctgatttgaacaatgcacgacctatagtaaaccgtgaccaataagttatattagtcaatggtatatccaaaccatcaggtgtggatagtccagtctttggtatcgatagtgtagttattgaactgagaagttaccgtatagtctttttggtcatctctaaacaaggaaactaatacctctacactattgaacgatttatcttccgtaatgggtggactagcgatggatgaagtcacgaatataagacacgctattaatccgtatatcatcattttgatattacttataataacgatttgtttaatttttagtttatactattaattgtaaatgatattattatttttttaagtattatcagctttagtttatactattactatttgtaatatttagacatagataaacgtgataaaagtctatttgtttatatttattgcggatagcagtatttccctataaaaagtatacgtcctgtggtgtctttaatcatgtacatgaatggatggtttatgtagaccttcgtacgatataccatcgaaaagttaatcgtaaatactcctgtaacggccgatgcttctgtatactcctcattaacatctataaacgtcgtatgtagaaatttttctacagtgatagtttcattacacatcttgctaaaatctgcataatatccgaatatattagtaagtcctaaattttctaaaatcggtaccagattatacggttctgtcatttccactttaaactttggcatatacaagtctatacttttagtagataacataccacaccattttttaaatttttcatctgttatatttttttctatgttatatataccttctatgtcgtccggtagtataatcaccatactagagtttccctcgtatggaatatcgataatagagaatcctccgaataattcattaatatgtacatattgcaagttattctcggtacccaccatcatatcaacactggtaactatattcttagaaatataaaacttgtctgtatatgtaagatgtttagaaaatggatatttccacattgctttaaaatggacggcgctaacaactgtcatacgagtattaatggatagcggactagtcaataaggaattaattttaccatttgtcattgtcttaacccattcgttgattagttcctttgtttggttagcattattaaagtttacagtttgaaaatcgtcttttattttttgtaggaaggaggcgtggaactcgatactatcgctaccgtatattttatttgcggtagctagtgtcgcacaatacggaatatctacgtccatgtcattattgtcatcgggtgtattctcattcatattctctatatattttgatagttgttcagctgtagaaccagctgctccatgatttagaatagataaagtagataaaatagaaactggagaaatcaaaacattttcatcagggtgttttacgattagttctttaaagatatccatggtatagaccaaacaataacgataacgatatatatcataaataaataatgttaaatttcagtttatgtttgtaccccgtattcatacttaacaaattggtattgcgtacacaatcaatcatattacataccattaataatgcaagcataaaaaatcgttagtagatgtttctaaatataggttccgtaagcaaagaatataagaatgaagcggtaatgataaaatcaatcgttatctaaaatgatcatactcatttattttattctattatattaacacatacatttttaacagcaacacattcaatattgtattgttatttttatattatttacacaattaacaatatattattagtttatattactgaattaataatataaaattcccaatcttgttataaacacacactgagaaacagcataaacacagaatccatcaaaaatgtcgatgaaatatctgatgttgttgttcgctgctatgataatcagatcattcgccgatagtggtaacgctatcgaaacgacattgccagaaattacaaacgctacaacagatattccagctatcagattatgcggtccagagggagatggatattgtttacacggtgactgtatccacgctagagatatcgacggtatgtattgtagatgctctcatggttatacaggcattagatgtcagcatgtagtattagtagactatcaacgttcagaaaacccaaacactacaacgtcatatatcccatctcccggtattatgcttgtattagtaggcattattattattattacgtgttgtctattatctgtttataggttcactcgaagaactaataaactacctctacaagatatggttgtgccataatttttataaattttttttatgagtatttttacaaaaatgtataaagtgtatgtcttatgtatatttataaaaatgctaaatatgcgatgtatctatgttatttgtatttatctaaacaatacctctacctctagatattatacaaaaattttttatttcagcatattaaagtaaaatctagttaccttgaaaatgaatacagtgggtggttccgtatcaccagtaagaacataatagtcgaatacagtatccgattgagattttgcatacaatactagtctagaaagaaatttgtaatcatcttctgtgacgggagtccatatatctgtatcatcgtctagtttatcagtgtcccatgctatattcctgttatcatcattagttaatgaaaataactctcgtgcttcagaaaagtcaaatattgtatccatacatacatctccaaaactatcgcttatacgtttatctttaacgatacctatacctagatggttatttactaacagacattttccagatctattgactataactcctatagtttccacatcaaccaagtaatgatcatctattgttatataacaataacataactcttttccgtttttatcagtatgtatatctatattaacgtcgtcgttgtagtgaatagtagttattgatctattatatgaaacggatatgtctagaacggcaattgttttacgtccagttaacactttctttgatttaaagtctagagtctttgcaaacataatatccttatccgactttatatttcctgtagggtggtataattttattttgcctccacatatcggtgtttccaaatatattactagacaatattccatatagttattagttaagggtacccaattagaacacgtacgcttattatcatcatttggatcgtatttcataaaagttattgtactatcgatgtcaacacattctacattttttaatcgtctatatagtatttttctgatattttctataatatcagaattgtcttccatcggaagttgtatactatcagaatcagttacatgtttaaataattctctgatgtcattccttatacaatcaaattcattattaaacagtttaatagtctgtagacctttatcgtcgtaaatatccattgtcttattagttacgcttatttttatgtgtttttacgttgctttattatattttataagaatgattgtttgacgaatcacgagaactattaagacatatattattagaggtatatattataaaaaagtttttgattacgatgttataagaggaaagaggacacattaacatcatacatcaattaactacattcttataacatcgtaatcaaaagaattgcaattttgatgtataacaactgtcaatgggttatggaattgtatattacatattatacggtatgttggtaacgacaaataccgatcggtaattgtctgccggtgtaatagaattatatatatctatctattacaccggctgagtacctacactattatatgattatagtttctatttttacagtaccttaactaaagtctctagtcacaagagcaatactaccaacctacactattatatgattatagtttctatttttataggaacgcgtacgagaaaatcaaatgtctaatttctaacggtagtgttgataaacgattatcgtcaatggatacctcctctatcatgtcgtctattttcttactttgttctattaacttattagcattatatattatttgattataaaacttatattgcttattagcccaatctgtaaatatcggattattaacatatcgtttctttgtaggtttatttaacatgtacatcactgtaagcatgtccgtaccatttattttaatttgacgcatatccgcaatttctttttcgcagtcggttataaattctatatatgatggatacatgctacatgtgtacttataatcgactaatatgaagtacttgatacatattttcagtaacgatttattattaccacctatgaataagtacctgtgatcgtctaggtaatcaactgttttcttaatacattcgatggttggtaatttactcagaataatttccaatatcttaatatataattctgctatttctggaatatatttatctgccagtataacacaaatagtaatacatgtaaacccatattttgttattatattaatgtctgcgccattatctattaaccattctactaggctgacactatgcgacttaatacaatgataaagtatactacatccatgtttatctattttgtttatatcatcaatatacggcttacaaagttttagtatcgataacacatccaactcacgcatagagaaggtagggaataatggcataatatttattaggttatcatcattgtcattatctacaactaagtttccattttttaaaatatactcgacaactttaggatctctattgccaaatttttgaaaatatttatttatatgcttaaatctatataatgtagctccttcatcaatcatacatttaataacattgatgtatactgtatgataagatacatattctaacaatagatcttgtatagaaactgtatatcttttaagaattgtggatattaggatattattacgtaaactattacacaattctaaaatataaaacgtatcacggtcgaataatagttgatcaactatataattatcgattttgtgatttttcttcctaaactgtttacgtaaatagttagatagaatattcattagttcatgaccactatagttactatcgaataacgcgtcaaatatttcccgtttaatatcgcatttgtcaagataataatagagtgtggtatgttcacgataagtataataacgcatctcttttttgtgtgaaattaaatagtttattacgtccaaagatgtagcataaccatcttgtgacctagtaataatataataatagagaactgttttacccattctatcatcataatcagtggtgtagtcgtaatcgtaatcgtctaattcatcatcccaattataatattcaccagcacgtctaatctgttctattttgatcttgtatccatactgtatgttgctacatgtaggtattcctttatccaataatagtttaaacacatctacattgggatttgatgttgtagcgtatttctctacaatattaataccatttttgatactatttatttctatacctttcgaaattagtaatttcaataagtctatatcgatgttatcagaacatagatattcgaatatatcaaaatcattgatatttttatagtcgactgacgacaataacaaaatcacaacatcgtttttgatattattatttttcttggtaacgtatgcctttaatggagtttcaccatcatactcatataatggatttgcaccactttctatcaatgattgtgcactgctggcatcgatgttaaatgttttacaactatcatagagtatcttatcgttaaccatgattggttgttgatgctatcgcattttttggtttctttcatttcagttatgtatggatttagcacgtttgggaagcatgagctcatatgatttcagtactgtagtgtcagtactattagtttcgatcagatcaatgtctagatctatagaatcaaaacacgataggtcagaagataatgaatatctgtacgcttctttttgtactgtaacttctcgttttgttagatgtttgcatcgtgctttaacatcaatggtacaaattttatcctcgctttgtgtatcatattcgtccctactataaaattgtatattcagattatcatgagatgtgtatacgctaacggtatcaataaacggagcacaccatttagtcataaccgtaatccaaaaatttttaaagtatatcttaacgaaagaagttgtatcatcgttaggatttggtaaatcattatctacagtgtatggtactagatcctcataagtgtatatatctagagtaatgtttaatttatcaaatggttgataatatggatcctcatgacaatttccgaagatggaaatgagatatagacatgcaataaatctaatcgaagacatggttactccttaaaaaaatacgaataatcaccttggctatttagtaagtgtcatttaacactatactcatattaatccatggactcataatctctatacgggattaacggatgttctatatacggggatgagtagttctcttctttaactttatactttttactaatcatatttagactgatgtatgggtaatagtgtttgaagagctcgttctcatcatcagaataaatcaatatctctgtttttttgttatacagatgtattacagcctcatatattacgtaatagaacgtgtcatctaccttattaactttcaccgcatagttgtttgcaaatacggttaatcctttgacctcgtcgatttccgaccaatctgggcgtataatgaatctaaactttaatttcttgtaatcattcgaaataatttttagtttgcatccgtagttatcccctttatgtaactgtaaatttctcaacgcgatatctccattaataatgatgtcgaattcgtgctgtatacccatactgaatggatgaacgaataccgacggcgttaatagtaatttactttttcatctttacatattgggtactagttttactatcataagtttataaattccacaagctactatggaataagccaaccatcttagtataacacacatgtcttaaagtttattaattaattacatgttgttttatatatcgctacgaatttaaacagagaaatcagtttaggaaaaaaaattatctatctacatcatcacgtctctgtattctacgatagagtgctactttaagatgagacatatccgtgtcatcaaaaatatactccattaaaatgattattccggcagcgaacttgatattggatatatcacaacctttgttaatatctacgacaatagacagcagtcccatggttccataaacagtgagtttatctttctttgaagagatattttgtagagatcttataaaactgtcgaatgacatcgcatttatatctttagctaaatcgtatatgttaccatcgtaatatctaaccgcgtctatcttaaacgtttccatcgctttaaagacgtttccgatagatggtctcatttcatcagtcatactgagccaacaaatataatcgtgtataacatctttgatagaatcagactctaaagaaaacgaatcggctttattatacgcattcatgataaacttaatgaaaaatgtttttcgttgtttaagttggatgaatagtatgtcttaataattgttattatttcattaattaatatttagtaacgagtacactctataaaaacgagaatgacataactagttatcaaagtgtctaggacgcgtaattttcatatggtatagatcctgtaagcattgtctgtattctggagctattttctctatcgcattagtgagttcagaatatgttataaatttaaatcgaataacgaacataactttagtaaagtcgtctatattaactcttttattttctagccatcgtaataccatgtttaagatagtatattctctagttactacgatctcatcgttgtctagaatatcacatactgaatctacatccaattttagaaattggtctgtgttacatatctcttctatattattgttgatgtattgtcgtagaaaactattacgtagaccattttctttataaaacgaatatatagtactccaattatctttaccgatatatttgcacacataatccattctctcaatcactacatctttaagattttcgttgttaagatatttggctaaactatataattctattagatcatcaacagaatcagtatatatttttctagatccaaagacgaactctttggcgtcctctataatattcccagaaaagatattttcgtgttttagtttatcgagatctgatctgttcatatacgccatgattgtacggtacgttatgataaccgcataaaataaaaatccattttcatttttaaccaatactattcataattgagattgatgtaatactttgttactttgaacgtaaagacagtacacggatccgtatctccaacaagcacgtagtaatcaaatttggtgttgttaaacttcgcaatattcatcaatttagatagaaacttatactcatcatctgttttaggaatccatgtattattaccactttccaacttatcattatcccaggctatgtttcgtccatcatcgttgcgcagagtgaataattcttttgtattcggtagttcaaatatatgatccatgcatagatcggcaaagctattgtagatgtgatttttcctaaatctaatataaaactcgtttactagcaaacactttcctgatttatcgaccaagacacatatggtttctaaatctatcaagtggtggggatccatagttatgacgcagtaacatatattattacattcttgactgtcgctaatatctaaatatttattgttatcgtattggattctgcatatagatggcttgtatgtcaaagatatagaacacataaccaatttatagtcgcgctttacattctcgaatctaaagttaagagatttagaaaacattatatcctcggatgatgttatcactgtttctggagtaggatatattaaagtctttacagatttcgtccgattcaaataaatcactaaataatatcccacattatcatctgttagagtagtatcattaaatctattatattttatgaaagatatatcactgctcacctctatatttcgtacatttttaaactgtttgtataatatctctctgatacaatcagatatatctattgtgtcggtagacgataccgttacatttgaattaatggtgttccattttacaacttttaacaagttgaccaattcatttctaatagtatcaaactctccatgattaaatattttaatagtatccattttatatcactacggacacaaagtagctgacataaaccattgtataatttttatgttttatgtttattagcgtacacattttggaagttccggcttccatgtatttcctggagagcaagtagatgatgaggaaccagatagtttatatccgtacttgcacttaaagtctacattgtcgttgtatgagtatgatcttttaaacccgctagacaagtatccgtttgatattgtaggatgtggacatttaacaatctgacacgtgggtggatcggaccattctcctcctgaacacaggacaccagagttaccaatcaacgaatatccactattgcaactataagttacaacgcttccatcggtataaaaatcctcgtatccgttatgtcttccgttggatatagatggaggggattggcatttaacagattcacaaataggtgcctcgggattccataccatagatccagtagatcctaattcacaatacgatttagattcaccgatcaaatgatatccgctattacaagagtacgttatactagagccaaagtctactccaccaatatcaagttggccattatcgatatctcgaggcgatgggcatctccgtttaatacattgattaaagagtgtccatccagtacctgtacatttagcatatataggtcccattttttgctttctgtatccaggtagacatagatattctatagtgtctcctatgttgtaattagcattagcatcagtctccacactattcttaaatttcatattaatgggtcgtgacggaatagtacagcatgatagaacgcatcctattcccaacaatgtcaggaacgtcacgctctccaccttcatatttatttatccgtaaaaatgttatcctggacatcgtacaaataataaaaagcccatatatgttcgctattgtagaaattgtttttcacagttgctcaaaaacgatggcagtgacttatgagttacgttacactttggagtctcatctttagtaaacatatcataatattcgatattacgagttgacatatcgaacaaattccaagtatttgattttggataatattcgtattttgcatctgctataattaagatataatcaccgcaagaacacacgaacatctttcctacatggttaaagtacatgtacaattctatccatttgtcttccttaactatatatttgtatagataattacgagtctcgtgagtaattccagtaattacatagatgtcgccgtcgtactctacagcataaactatactatgatgtctaggcatgggagacttttttatccaacgatttttagtgaaacattccacatcgtttaatactacatatttttcatacgtggtataaactccacccattacatatatatcatcgtttacgaataccgacgcgcctgaatatctaggagtaattaagtttggaagtcttatccatttcgaagtgccgtgtttcaaatattctgccacacccgttgaaatagaaaattctaatcctcctattacatataactttccatcgttaacacaagtactaacttctgattttaacgacgacatattagtaaccgttttccattttttcgtttcaagatctacccgcgatacggaataaacatgtctattgttaatcatgccgccaataatgtatagacaattatgtaaaacatttgcattatagaattgtctatctgtattaccgactatcgtccaatattctgttctaggagagtaatgggttattgtggatatataatcagagtttttaatgactactatattatgttttataccatttcgtgtcactggctttgtagatttggatatagttaatcccaacaatgatatagcattgcgcatagtattagtcataaacttgggatgtaaaatgttgatgatatctacatcgtttggatttttatgtatccactttaataatatcatagctgtaacatcctcatgatttacgttaacgtcttcgtgggataagatagttgtcagttcatcctttgataattttccaaattctggatcggatgtaaatctcgtaagataaagtttatacaagtgtagatgataaattctacagaggttaatatagaagcacgtaataaattgacgacgttatgactatctatatatacctttccagtatacgagtaaataactatagaagttaaactgtgaatgtcaaggtctagacaaacccttgtaactggatctttatttttcgtgtatttttgacgtaaatgtgtgcgaaagtaaggagataactttttcaatatcgtagaattgactattatattgccacctatagcatcaataattgttttgaatttcttagtcatagacaatgctaatatattcttacagtacacagtattgacaaatatcggcatttatgtttctttaaaagtcaacatctaaagaaaaatgattatcttcttgagacataactcccattttttggtattcacccacacgtttttcgaaaaaattagtttttccttccaatgatatattttccatgaaatcaaacggattggtaacattataaatttttttaaatcccaattcagaaatcaatctatccgcgacaaattctatatatgttttcatcatttcacaattcattcctataagtttaactggaagagccgcagtaagaaattcttgttcaatggatactgcatctgttataatagatctaacggtttcttcactcggtggatacaataaatgtttaaacatcaaacatgcgaagtcgcagtgcagaccctcgtctctactaattagttcgttggaaaacgtgagtccgggcattaggccacgctttttaagccaaaatatggaagcgaatgatccggaaaagaagattccttctactgcagcaaaggcaataagtctctctccataaccggcgctgtcatgtatccacttttgagcccaatcggccttcttttttacacaaggcattgtttctatggcattaaagagatagtttttttcattactatctttaacataagtatcgatcaaaagactatacatttccgaatgaatgttttcaatggccatctgaaatccgtagaaacatctagcctcggtaatctgtacttctgtacaaaatcgttccgccaaattttcattcactattccgtcactggctgcaaaaaacgccaatacatgttttataaaatatttttcgtctggtgttagtttattccaatcattgatatctttagatatatctacttcttccactgtccaaaatgatgcctctgcctttttatacatgttccagatgtcataatattggattgggaaaataacaaatctatttggatttggtgcaaggatgggttccataactaaattaacaatatcaataaattttttttcagttatctatatgcctgtacttggattttttgtacatcgatatcgccgcaatcactacaataattacaagtattattgatagcattgttattagtactatcataattaaattatcgacattcatgggtgctgaataatcgttattatcatcattatcattttgtaattgtgacatcatactagataaatcgtttgcgagattgttgtgggaagcgggcatggaggatgcattatcattattatttaacgccttccattcggattcacaaatatggcgcgcgttcaacattttatggaaactataattttgtgaaaacagataacaagaaaactcgtcatcgttcaaatttttaacgatagtaaaccgattaaacgtcgagctaatttctaacgctagcgactctgttggatatgggtttccagatatatatcttttcagttcccctacgtatctataatcatctgtaggaaatggaagatatttccatttatctactgttcctaatatcatatgtggtggtgtagtagaaccattaagcgcgaaagatgttatttcgcatcgtattttaacttcgcaataatttctggttagataacgcactctaccagtcaagtcaatgatattagcctttacagatatattcatagtagtcgtaacgatgactccatcttttagatgcgatactcctttgtatgtaccagaatcttcgtacctcaaactcgatatatttaaacaagttaatgagatattaacgcgttttatgaatgatgatatataaccagaagttttatcctcggtggctagcgctataaccttatcattataataccaactagtgtgattaatatgtgacacgtcagtgtgggtacaaatatgtacattatcgtctacgtcgtattcgatacatccgcatacagccaacaaatataaaatgacaaatactctaacgacgttcgtacccatcttgatgcggtttaataaatgttttgatttcaatttattgtaaaaaaagattcggttttatactgttcgatattctcattgcttatattttcatctatcatctccacacagtcaaatccgtggttagcatgcacctcatcaaccggtaaaagactatcggactcttctatcattataactctagaatatttaatttggtcattattaatcaagtcaattatcttatttttaacaaacgtgagtattttactcattttttataaaaacttttagaaatatacagactctatcgtgtgtctatatcttctttttatatccaatgtatttatgtctgatttttcttcatttatcatatataatggtccaaattctacacgtgcttcggattcatccagatcattaaggttcttataattgtaacatccttctcttccctcttctacatcttccttcttattcttattcttattcttattcttattcttattcttattcttattcttagcgtcacagaatctaccacagcagaatcccatgacgagcgtcatattaaactaattcattttcaattataatatacgattagtaatgaccattaaaataaaaaatattcttcataaccggcaagaaagtgaaaagttcacattgaaactatgtcagtagtatacatcatgaaatgatgatatatatatattctctattttggtggaggattatatgatataattcgtggataatcattcttaagacacatttcttcattcgtaaatcttttcacgttaaatgagtgtccatattttgcaatttcttcatatgatggcggtgtacgtggacgaggctgctcctgttcttgttgtggtcgccgactatcgtgtttgcgtttagatccctccattatcgcgattgcgtagatggagtactattttataccttgtaattaaatttttttattaattaaacgtataaaaacgttccgtatctgtatttaagagccagatttcgtctaatagaacaaatagctacagtaaaaataactagaataattgctacacccactagaaaccacggatcgtaatacggcaatcggttttcgataataggtggaacgtatattttatttaaggacttaacaattgtctgtaaaccacaatttgcttcagcggatcctgtattaactatctgtaaaagcatatgttgaccgggcggagccgaacattctccgatatctaatttctgtatatctataatattattaacctccgcatacgcattacagttcttttctagcttggataccgcactaggtacatcgtctagatctattcctatttcctcagcgatagctcttctatccttttccggaagcaatgaaatcacttcaataaatgattcaaccatgagtgtgaaactaagtctagaattactcatgcatttgttagttattcggagcgcgcaatttttaaactgtcctataacctctcctatatgaatagcacaagtgacattagtagggatagaatgttgagctaatttttgtaaataactatctataaaaagattatacaaagttttaaactctttagtttccgccatttatccagtctgagaaaatgtctctcataataaatttttccaagaaactaattgggtgaagaatggaaacctttaatctatatttatcacagtctgttttggtacacatgatgaattcttccaatgccgtactaaattcgatatctttttcgatttctggatatgtttttaataaagtatgaacaaagaaatggaaatcgtaataccagttatgtttaactttgaaattgttttttattttcttgttaatgattccagccacttgggaaaagtcaaagtcgtttaatgccgatttaatacgttcattaaaaacaaactttttatcctttagatgaattattattggttcattggaatcaaaaagtaagatattatcgggtttaagatctgcgtgtaaaaagttgtcgcagcatggtagttcgtagattttaatgtataacagagccatctgtaaaaagataaactttatgtattgtaccaaagatttaaatcctaatttgatagctaactcggtatctactttatctgccgaatacagtgctaggggaaaaattataatgtttcctctttcatattcgtagttagttctcttttcatgttcgaaaaagtgaaacatgcggttaaaatagtttataacattaatattactgttaataactgccgggtaaaagtgggatagtaatttcacgaatttgatactgtcctttctctcgttaaacgcctttagaaaaactttagaagaatatctcaatgagagttcctgaccatccatagtttgtatcaataatagcaacatatgaagaacacgtttatacagagtatgtaaaaatgttaatttatagtttaatcccatggcccacgcacacacgattaattttttttcatctccctttagattgttgtatagaaatttgggtactgtgaactccgccgtagtttccatgggactatataattttgtggcctcgaatacaaattttactacatagttatctatcttaaaaactataccatatcctcctgtagatatgtgataaaaatcgtcgtttataggataaaatcgtttatccttttgttggaaaaatgatgaattaatgtaatcattctcttctatctttagtagtgtttccctattaaaattcttaaaataatttaacaatctaactgacggagcccaattttggtgtaaatctaattgggacattatgttgttaaaatataaacagtctcctaatataacagtatctgataatctatggggagacatccattgatattcaggggatgaatcattggcaacacccatttattgtacaaaaagccccaatttacaaacgaaagtccaggtttgatagagacaaactattaactattttgtctctgtttttaacacctccacagtttttaatttctttggtaatgaaattattcacaatatcagtatcttctttatctaccagagattttactaacttgataaccttggctgtctcattcaatagggtagtaatatttgtatgtgtgatattgatatctttttgaattgtttcttttagaagtgattctttgatggtgtcagcatacgaattacaataatgcagaaactcggttaacatgcaggaattatagtaagccaattccaattgttgcctgtgttgtattagagtgtcaatatgagcaatggtgtccttgcgtttctctgatagaatgcgagcagcgattttggcgttatcatttgacgatatttctggaatgacgaatcctgtttctactaactttttggtaggacaaagtgaaacaatcaagaagatagcttctcctcctatttgtggaagaaattgaactcctctagatgatctactgacgatagtatctccttgacagatattggaccgaattacagaagtacctggaatgtaaagccctgaaaccccctcattttttaagcagattgttgccgtaaatcctgcactgtgaccaagatagagagctcctttggtgaatccatctctatgtttcagtttaaccaagaaacagtcagctggtctaaaatttccatctctatctaatacagcatctaacttgatgtcaggaactatgaccggtttaatgttatatgtaacattgagtaaatccttaagttcataatcatcactgtcatcagttatgtacgatccaaacaatgtttctaccggcatagtggatacgaagatgctatccatcagaatgtttccctgattagtattttctatatagctattcttctttaaacgattttccaaatcagtaactatgttcatttttttaggagtaggacgcctagccagtatggaagaggattttctagatcctctcttcaacatctttgatctcaatggaatgcaaaaccccatagtgaaacaaccaacgataaaaataatattgtttttcactttttataattttaccatctgactcatggattcattaatatctttataagagctactaacgtataattctttataactgaactgagatatatacaccggatctatggtttccataattgagtaaatgaatgctcggcaataactaatggcaaatgtatagaacaacgaaattatactagagttgttaaagttaatattttctatgagctgttccaataaattatttgttgtgactgcgttcaagtcataaatcatcttgatactatccagtaaaccgtttttaagttctggaatattattatcccattgtaaagcccctaattcgactatcgaatatcctgctctgatagcagtttcaatatcgacggacgtcaatactgtaataaaggtggtagtattgtcatcatcgtgataaactactggaatatggtcgttagtaggtacggtaactttacacaacgcgatatataactttccttttgtaccatttttaacgtagttgggacgtcctgcagggtattgttttgaagaaatgatatcgagaacagatttgatacgatatttgttggattcctgattatttactataatataatctagacagatagatgattcgataaatagagaaggtatatcgttggtaggataatacatccccattccagtattctcggatactctattaatgacactagttaagaacatgtcttctattctagaaaacgaaaacatcctacatggactcattaaaacttctaacgctcctgattgtgtctcgaatgcctcgtacaaggatttcaaggatgccatagattctttgaccaacgatttagaattgcgtttagcatctgatttttttattaaatcgaatggtcggctctctggtttgctaccccaatgataacaatagtcttgtaaagataaaccgcaagaaaatttatacgcatccatccaaataaccctagcaccatcggatgatattaatgtattattatagattttccatccacaattattgggccagtatactgttagcaacggtatatcgaatagattactcatgtaacctactagaatgatagttcgtgtactagtcataatatctttaatccaatctaagaaatttaaaattagattttttacactgttaaagttaacaaaggtattacccgggtacgtggatatcatatatggtattggtccattatcagtaatagctccataaactgatacggcgatggtttttatatgtgtttgatctaacgaggaagaaattcgcacccacaattcatctctagatatgtatttaatatcaaacggtaacacatcaatttcgggacgcgtatatgtttctaaatttttaatccaaatataatgatgacctatatgccctattatcatactgtcaactatagtacacctagagaacttacgatacatctgtttcctataatcgttaaattttacaaatctataacatgctaaaccttttgacgacaaccattcattaatttctgatatggaatctgtattctcgataccgtattgttctaaagccagtgctatatctccctgttcgtgggaacgctttcgtataatatcgatcaacggataatctgaagtttttggagaataatatgactcatgatctatttcgtccataaacaatctagacataggaattggaggcgatgatcttaattttgtgcaatgagtcgtcaatcctataacttctaatcttgtaatattcatcatcgacataatactatctatgttatcatcgtatattagtataccatgaccttcttcatttcgtgccaaaatgatatacagtcttaaatagttacgcaatatctcaatagtttcataattgttagctgttttcatcaagatttgtaccctgtttaacatgatggcgttctatacgtttctattttctattttttaaatttttaaatttttaacgatttactgtggctagatacccaatctctctcaaatatttttttagcctcgcttacaagctgtttatctatactattaaaactgacgaatccgtgattttggtaatgggttccgtcgaaatttgccgaagtgatatgaacatattcgtcgtcgactatcaacaattttgtattattctgaatagtgaaaaccttcacagatagatcattttgaacacacaacgcgtctagacttctggcggttgccatagaatatacgtcgttcttatcccaattaccaactagaagtctgatcttaactcctctattaatggctgcttctataatggagttgtaaatgtcgggccaatagtagctattaccgtcgacacgtgtagtgggaactatggccaaatgttcaatatctatactagtcttagctgacctgagtttatcaataactacatcggtatctagatctctagaatatcccaataggtgttccggagaatcagtaaagaacactccacctataggattcttaatatgatacgcagtgctaactggcagacaacaagccgcagagcataaattcaaccatgaattttttgcgctattaaaggctttaaaagtatcaaatcttctacgaagatctgtggccagcgggggataatcagaatatacacctaacgttttaatcgtatgtatagatcctccagtaaatgacgcgtttcctacataacatctttcatcatctgacacccaaaaacaaccgagtagtagtcccacattattttttttatctatattaacggttataaaatttatatccgggcagtgactttgtagctctcccagatttcttttccctcgttcatctagcaaaactattattttaatccctttttcagatgcctcttttagtttatcaaaaataagcgctcccctagtcgtactcagaggattacaacaaaaagatgctatgtatatatatttcttagctagagtgataatttcgttaaaacattcaaatgttgttaaatgatcggatctaaaatccatattttctggtagtgtttctaccagcctacattttgctcccgcaggtaccgatgcaaatggccacatttagttaacataaaaacttatacatcctgttctatcaacgattctagaatatcatcggctatatcgctaaaattttcatcaaagtcgacatcacaacctaactcagtcaatatattaagaagttccatgatgtcatcttcgtctatttctatatccgtatccattgtagattgttgaccgattatcgagtttaaatcattactaatactcaatccttcagaatacaatctgtatttcattgtaaatttataggcggtgtatttaagttggtagattttcaattatgtatcaatatagcaacagtagttcttgctcctccttgattctagcatcctcttcattattttcttctacgtacataaacatgtccaatacgttagacaacacaccgacgatggcggccgccacagacacgaatatgactagaccgatgaccatttaaaaacccctctctagctttcacttaaactgtatcgatcattcttttagcacatgtataatataaaaaaacattattctatttcgaatttaggcttccaaaaatttttcatccgtaaaccgataataatatatatagacttgttaatagtcggaataaatagattaatgcttaaactatcatcatctccacgattagagatacaatatttacattctttttgctgtttcgaaactttatcaatacacgttaatacaaacccaggaaggagatattgaaactgaggctgttgaaaatgaaacggtgaatacaataattcagataatgtaaaatcatgattccgtattctgatgatattagaactgctaatggatgtcgatggtatgtatctaggagtatctattttaacaaagcatcgatttgctaatatacaattatcattttgattaattgttattttattcatattcttaaaaggtttcatatttatcaattcttctacattaaaaatttccatttttaatttatgtagccccgcaatactcctcattacgtttcattttttgtctataatatccattttgttcatctcggtacatagattatccaattgagaagcgcatttagtagttttgtacattttaagtttattgacgaatcgtcgaaaactagttatagttaacattttattatttgataccctgatattaatacccctgccgttactattatttataactgatgtaacccacgtaacattggaattaactatcgatagtaatgcatcgacgcttccaaaattgtctattataaactcaccgataatttttttattacatgttttcatattcattaggattatcaaatctttaatcttactacgattgtatgcgttgatattacaagacgtcattctaaaagacggaggatttccatcaaatgccagacaatcacgtacaaagtacatggaaataggttttgttctattgcgcatcatagattcatatagaacacccgtagaaatactaatttgttttactctataaaatactaatgcatctatttcatcgttttgtataacgtctttccaagtgtcaaattccaaatttttttcattgatagtaccaaattcttctatctctttaactacttgcatagataggtaattacagtgatgcctacatgccgttttttgaaactgaatagatgcgtctagaagcgatgctacgctagtcacaatcaccactttcatatttagaatatatgtatgtaaaaatatagtagaatttcattttgtttttttctatgctataaatgaattctcattttgcatctgctcatactccgttttatatcaataccaaagaaggaagatatctggttctaaaagccgttaaagtatgcgatgttagaactgtagaatgcgaaggaagtaaagcttcctgcgtactcaaagtagataaaccctcatcacccgcgtgtgagagaagaccttcgtccccgtccagatgcgagagaatgaataaccctggaaaacaagtcccgtttatgaggacggacatgctacaaaatatgttcgcggctaatcgcgataatgtagcttctagacttttgaactaaaatacaattatatctttttcgatattaataaatccgtgtcgtccaggttttttatctctttcagtatgtgaatagataggtattttatctctattcatcatcgaatttaagagatccgataaacattgtttgtattctccagatgtcagcatctgatacaacaatatatgtgcacataaacctctggcacttatttcatgtaccttccccttatcactaaggagaatagtatttgagaaatatgtatacatgatattatcatgaattagatatacagaatttgtaacactctcgaaatcacacgatgtgtcggcgttaagatctaatatatcactcgataacacattttcatctagatacactagacattttttaaagctaaaatagtctttagtagtgacagtaactatgcgattattttcatcgatgatacatttcatcggcatattattacgcttaccatcaaagactataccatgtgtatatctaacgtattctagcatagttgccatacgtgcattaaacttttcaggatctttggatagatcttccaatctatctatttgagaaaacatttttatcatgttcaatagttgaaacgtcggatccactatatagatattatctataaagattttaggaactacgttcatggtatcctggcgaatattaaaactatcaatgatatgattatcgttttcatcttttatcaccatatagtttctaagatatgggattttacttaatataatattatttcccgtaataaattttattagaaatgccaaatctataagaaaagtcctcgaattagtttgaagaatatctatatcgccgtaccgtatatttggattaattagatatagagaatatgatccgtaacatatacaacttttattatggcgtctaagatattcttccatcaacttattaacatttttgactagggaagatacattatgacgtcccattacttttgccttgtctattattgcgacgttcatagaatttagcatatctcttgccaattcttccattgatgttacattataagaaattttagatgaaattacatttggagctttaatagtaagaactcctaatatgtccgtgtatgtggtcactaatacagattgtagttctataatcgtaaataatttacctatattatatgtttgagtctgtttagaaaagtagctaagtatacgatcttttatttctgatgcagatgtatcaacatcggaaaaaaatctttttttattcttttttactaaagatacaaatatgtctttgttaaaaacagttattttttgaatatttctagcttgtaattttaacatatgatattcattcacactaggtactctgcctaaataggtttctataatctttaatgtaatattaggaaaagtattctgatcaggattcctattcattttgaggatttaaaactctgattattgtctaatatggtctctacgcaaactttttcacagagcgatagagtttttgataactcgtttttcttaagaaatataaaactactgtctccagagctcgctctatcttttattttatttaattcgatacaaactcctgatactggttcagaaagtaattcattaattttcagtcctttatagaagatatttaatatagataatacaaaatcttcagtttttgatatcgatctgattgatcctagaactagatatattaataacgtgctcattaggcagtttatggcagcttgataattagatatagtatattccagttcatatttattagataccgcattgcccagattttgatattctatgaattcctctgaaaataaatccaaaataactaaacattctattttttgtggattagtgtactctcttccctctatcatgttcactactggtgtccacgatgataaatatctagagggaatataatatagtccataggatgccaatctagcaatgtcgaataactgtaatttgattcttcgttcttcattatgaattgattcttgaggtataaacctaacacaaattatattattagacttttcgtatgtaatgtctttcatgttataagtttttaatcctggaatagaatctattttaatgaggcttttaaacgcagagttctccaacgagtcaaagcataatactctgttgtttttcttatatacgatgttacgattttcttctttgaatggaataggtttttgaattagtttataattacaacataatagataaggaagtgtgcaaatagtacgcggaaaaaacataatagctcccctgttttcatccatggttttaagtaaatgatcactggcttctttagttaatggatattcgaacattaaccgtttcatcatcattggacagaatccatatttcttaatgtaaagagtgatcaaatcattgtgtttattgtaccatcttgttgtaaatgtgtattcggttatcggatctgctcctttttctattaaagtatcgatgtcgatctcgtctaagaattcaactatatcgacatatttcatttgtatacacataaccattactaacgtagaatgtataggaagagatgtaacgggaacagggtttgttgattcgcaaactattctaatacataattcttctgttaatacgtcttgcacgtaatctattatagatgccaagatatctatataattattttgtaagatgatgttaactatgtgatctatataagtagtgtaataattcatgtatttcgatatatgttccaactctgtctttgtgatgtctagtttcgtaatatctatagcatcctcaaaaaatatattcgcatatattcccaagtcttcagttctatcttctaaaaaatcttcaacgtatggaatataataatctattttacctcttctgatatcattaatgatatagtttttgacactatcttctgtcaattgattcttattcactatatctaagaaacggatagcgtccctaggacgaactactgccattaatatctctattatagcttctggacataattcatctattataccagaattaatgggaactattccgtatctatctaacatagttttaagaaagtcagaatctaagacctgatgttcatatattggttcatacatgaaatgatctctattgatgatagtgactatttcattctctgaaaattggtaactcattctatatatgctttccttgttgatgaaggatagaatatactcaatagaatttgtaccaacaaactgttctcttatgaatcgtatatcatcatctgaaataatcatgtaaggcatacatttaacaattagagacttgtctcctgttatcaatatactattcttgtgataatttatgtgtgaggcaaatttgtccacgttctttaattttgttatagtagatatcaaatccaatggagctacagttcttggcttaaacagatatagtttttctggaacaaattctacaacattattataaaggactttgggtagataagtgggatgaaatcctattttaattaatgctatcgcattgtcctcgtgcaaatatccaaacgcttttgtgatagtatggcattcattgtctagaaacgctctacgaatatctgtgacagatatcatctttagagaatatactagtcgcgttaatagtactacaatttgtattttttaatctatctcaataaaaaaattaatatgtatgattcaatgtataactaaactactaactgttattgataactagaatcagaatctaatgatgacgtaaccaagaagtttatctactgccaatttagctgcattatttttagcatctcgtttagattttccatctgccttatcgaatactcttccgtcgatgtctacacaggcataaaatgtaggagagttactaggcccaactgattcaatacgaaaagaccaatctctcttagttatttggcagtactcattaataatggtgacagggttagcatctttccaatcaataatttttttagccggaataacatcatcaaaagacttatgatcctctctcattgatttttcgcgggatacatcatctattatgacgtcagccatagcatcagcatccggcttatccgcctccgttgtcataaaccaacgaggaggaatatcgtcggagctgtacaccatagcactacgttgaagatcgtacagagctttattaacttctcgcttctccatattaagttgtctagttagttgtgcagcagtagctccttcgattccaatgtttttaatagccgcacacacaatctctgcgtcagaacgctcgtcaatatagatcttagacatttttagagagaactaacacaaccagcaataaaactgaacctactttatcatttttttattcatcatcctctggtggttcgtcgtttctatcgaatgtagctctgattaacccgtcatctataggtgatgctggttctggagattctggaggagatggattattatctggaagaatctctgttatttccttgttttcatgtatcgattgcgttgtaacattaagattgcgaaatgctctaaatttgggaggcttaaagtgttgtttgcaatctctacacgcgtgtctaactagtggaggttcgtcagctgctctagtttgaatcatcatcggcgtagtattcctacttttacagttaggacacggtgtattgtatttctcgtcgagaacgttaaaataatcgttgtaactcacatcctttattttatctatattgtattctactcctttcttaatgcattttataccgaataagagatagcgaaggaattctttttcggtgccgctagtacccttaatcatatcacatagtgttttatattccaaatttgtggcaatagacggtttatttctatacgatagtttgtttctggaatcctttgagtattctataccaatattattctttgattcgaatttagtttcttcgatattagattttgtattacctatattcttgatgtagtactttgatgatttttccatggcccattctattaagtcttccaagttggcatcatccacatattgtgatagtaattctcggatatcagtagcggctaccgccattgatgtttgttcattggatgagtaactactaatgtatacattttccatttataacacttatgtattaactttgttcatttatattttttcattattatgttgatattaacaaaagtgaatatatatgttaataattgtattgtggttatacggctacaatttcataatgagtggaagtcagtgtccgatgatcaatgacgatagctttactctgaaaagaaagtatcaaatcgatagtgcggagtcaacaatgaaaatggataagaagaggacaaagtttcagaatagagccaaaatggtaaaagaaataaatcagacaataagagcagcacaaactcattacgagacattgaaactaggatacataaaatttaagagaatgattaggactactactctagaagatatagcaccatctattccaaataatcagaaaacttataaactattctcggacatttcagccatcggcaaagcatcacagaatccgagtaagatggtatatgctctgctgctttacatgtttcccaatttgtttggagatgatcatagattcattcgttatagaatgcatccaatgagtaaaatcaaacacaagatcttctctcctttcaaacttaatcttattagaatattagtggaagaaagattctataataatgaatgcagatctaataaatggagaataattggaacacaagttgataaaatgttgatagctgaatctgataaatatacaatagatgcaaggtataacctaaaacccatgtatagaatcaagggaaaatctgaagaagataccctcttcatcaaacagatggtagaacaatgtgtgacatcccaggaattggtggaaaaagtgttgaagatactgtttagagatttgttcaagagtggagaatacaaagcgtacagatacgatgatgatgtagaaaatggatttattggattggatacactaaaattaaacattgttcatgatatagttgaaccatgtatgcctgttcgtaggccagtggctaagatactgtgtaaagaaatggtaaataaatactttgagaatccgctacatattattggtaaaaatcttcaagagtgcattgactttgttagtgaataggcatttcatctttctccaatactaattcaaattgttaaattaataatggatagtataaatagttattagtgataaaatagtaaaaataattattagaataagagtgtagtatcatagataactctcttctataaaaatggattttattcgtagaaagtatcttatatacacagtagaaaataatatagattttttaaaggatgatacattaagtaaagtaaacaattttaccctcaatcatgtactagctctcaagtatctagttagcaattttcctcaacacgttattactaaggatgtattagctaataccaatttttttgttttcatacatatggtacgatgttgtaaagtgtacgaagcggttttacgacacgcatttgatgcacccacgttgtacgttaaagcattgactaagaattatttatcgtttagtaacgcaatacaatcgtacaaggaaaccgtgcataaactaacacaagatgaaaaatttttagaggttgccgaatacatggacgaattaggagaacttataggcgtaaattatgacttagttcttaatccattatttcacggaggggaacccatcaaagatatggaaatcatttttttaaaactgtttaagaaaacagacttcaaagttgttaaaaaattaagtgttataagattacttatttgggcttacctaagcaagaaagatacaggcatagagtttgcggataatgatagacaagatatatacactctatttcaacaaactggtagaatcgtccatagcaatctaacagaaacgtttagagattatatctttcccggagataagactagctattgggtgtggttaaacgaaagtatagctaatgatgcggatattgttcttaatagacacgccattaccatgtatgataaaattcttagttatatatactctgagataaaacaaggacgcgttaataaaaacatgcttaagttagtttatatctttgagcctgaaaaagatatcagagaacttctgctagaaatcatatatgatattcctggagatatcctatctattattgatgcaaaaaacgacgattggaaaaaatattttattagtttttataaagctaattttattaacggtaatacatttattagtgatagaacgtttaacgaggacttattcagagttgttgttcaaatagatcccgaatatttcgataatgaacgaattatgtctttattctctacgagtgctgcggacattaaacgatttgatgagttagatattaataacagttatatatctaatataatttatgaggtgaacgatatcacattagatacaatggatgatatgaagaagtgtcaaatctttaacgaggatacgtcgtattatgttaaggaatacaatacatacctgtttttgcacgagtcggatcccatggtcatagagaacggaatactaaagaaactgtcatctataaaatccaagagtaaacggctgaacttgtttagcaaaaacattttaaaatattatttagacggacaattggctcgtctaggtcttgtgttagatgattataaaggagacttgttagttaaaatgataaaccatcttaagtctgtggaggatgtatccgcattcgttcgattttctacagataaaaaccctagtattcttccatcgctaatcaaaactattttagctagttataatatttccatcatcgtcttatttcaaaggtttttgagagataatctatatcatgtagaagaattcttggataaaagcatccatctaaccaagacggataagaaatatatacttcaattgataagacacggtagatcatagaacagaccaaatatattattaataatttggtatatacatagatattaattatcacatattaaaaattcacacatttttgataaatgggaactgctgcaacaattcagactcccaccaaattaatgaataaagaaaatgcagaaatgattttggaaaaaattgttgatcatatagttatgtatattagtgacgaatcaagtgattcagaaaataatcctgaatatattgattttcgtaacagatacgaagactatagatctctcattataaaaagtgatcacgagtttgtaaagctatgtaaaaatcatgcagagaaaagttctccagaaacgcaacaaatgattatcaaacacatatacgaacaatatcttattccagtatctgaagtactattaaaacctataatgtccatgggtgacataattacatataacggatgtaaagacaatgaatggatgctagaacaactctctaccctaaactttaacaatctccgcacatggaactcatgtagcataggcaatgtaacgcgtctgttttatacattttttagttatctgatgaaagataaactaaatatataagtataatcccattctaatactttaacctgatgtattagcatcttattagaatattaacctaactaaaagacataacataaaaactcattacatagttgataaaaagcggtaggatataaatattatggctgccaccgttccgcgttttgacgacgtgtacaaaaatgcacaaagaagaattctagatcaagaaacattttttagtagaggtctaagtagaccgttaatgaaaaacacatatctatttgataattacgcgtatggatggataccagaaactgcaatttggagtagtagatacgcaaacttagatgcaagtgactattatcccatttcgttgggattacttaaaaagttcgagtttctcatgtctctatataaaggtcctattccagtatacgaagaaaaagtaaatactgaattcatagccaatggatcgttctctggtagatacgtatcatatcttcgaaagttttctgctcttccaacaaacgagtttattagttttttattattgacctccatccctatctataatatcttattctggtttaaaaacacacagtttgatattactaaacacacattattcagatacgtctatacagataatgccaaacacctggcgttggctaggtatatgcatcaaacaggagactataagcctttgtttagtcgtctcaaagagaattatatatttaccggtcccgttccaatatgtatcaaagatatagatcaccctaatcttagtagagcaagaagtccatccgattatgagacattagctaatattagtactatattgtactttaccaagtatgatccggtattaatgtttttattgttttacgtacctgggtattcaattactacaaaaattactccagccgtagaatatctaatggataaactgaatctaacaaagagcgacgtacaactgttgtaaattattttatgcttcgtaaaatgtaggttttgaaccaaacattctttcaaagaatgagatgcataaaactttattatccaatagattgactatttcggacgtcaatcgtttaaagtaaacttcgtaaaatattctttgatcactgccgagtttaaaacttctatcgataattgtctcatatgttttaatatttacaagttttttggtccatggtacattagccggacaaatatatgcaaaataatatcgttctccaagttctatagtttctggattatttttattatattcagtaaccaaatacatattagggttatctgcggatttataatttgagtgatgcattcgactcaacataaataattctagaggagacgatctactatcaaattcggatcgtaaatctgtttctaaagaacggagaatatctatacatacctgattagaattcatccgtccttcagacaacatctcagacagtctggtcttgtatgtcttaatcatattcttatgaaacttggaaacatctcttctagtttcactagtacctttattaattctctcaggtacagattttgaattcgacgatgctgagtatttcatcgttgtatatttcttcttcgattgcataatcagattcttatataccgcctcaaactctattttaaaattattaaacaatactctattattaatcagtcgttctaactctttcgctatttctatagacttatcgacatcttgactgtctatctctgtaaacacggagtcggtatctccatacacgctacgaaaacgaaatctgtaatctataggcaacgatgttttcacaatcggattaatatctctatcgtccatataaaatggattacttaatggattggcaaaccgtaacataccgttagataactctgctccatttagtaccgattctagatacaagatcattctacgtcctatggatgtgcaactcttagccgaagcgtatgagtatagagcactatttctaaatcccatcagaccatatactgagttggctactatcttgtacgtatattgcatggaatcatagatggccttttcagttgaactggtagcctgttttaacatctttttatatctggctctctctgccaaaaatgttcttaatagtctaggaatggttccttctatcgatctatcgaaaattgctatttcagagatgaggttcggtagtctaggttcacaatgaaccgtaatatatctaggaggtggatatttctgaagcaatagctgattatttatttcttcttccaatctattggtactaacaacgacaccgactaatgtttccggagatagatttccaaagatacacacattaggatacagactgttataatcaaagattaatacattattactaaacattttttgttttggagcaaataccttaccgccttcataaggaaacttttgttttgtttctgatctaactaagatagttttagtttccaacaatagctttaacagtggacccttgatgactgtactcgctctatattcgaataccatggattgaggaagcacatatgttgacgcacccgcgtctgtttttgtttctactccataatactcccacaaatactgacacaaacaagcatcatgaatacagtatctagccatatctaaagctatgtttagattataatccttatacatctgagctaaatcaacgtcatcctttccgaaagataatttatatgtatcattaggtaaagtaggacataatagtacgactttaaatccattttcccaaatatctttacgaattactttacatataatatcctcatcaacagtcacataattacctgtggttaaaacctttgcaaatgcagcggctttgcctttcgcgtctgtagtatcgtcaccgataaacgtcatttctctaactcctctatttaatactttacccatgcaactgaacgcgttcttggatatagaatccaatttgtacgaatccaatttttcagatttttgaatgaatgaatatagatcgaaaaatatagttccattattgttattaacgtgaaacgtagtattggccatgccgcctactcccttatgactagactgatttctctcataaatacagagatgtacagcttcctttttgtccggagatctaaagataatcttctctcctgttaataactctagacgattagtaatatatctcagatcaaagttatgtccgttaaaggtaacgacgtagtcgaacgttagttccaacaattgtttagctattcgtaacaaaactatttcagaacatagaactagttctcgttcgtaatccatttccattagtgactgtatcctcaaacatcctctatcgacggcttcttgtatttcctgttccgttaacatctcttcattaatgagcgtaaacaataatcgtttaccacttaaatcgatataacagtaacttgtatgcgagattgggttaataaatacagaaggaaacttcttatcgaagtgacactctatatctagaaataagtacgatcttgggatatcgaatctaggtatttttttagcgaaacagttacgtggatcgtcacaatgataacatccattgttaatctttgtcaaatattgctcgtccaacgagtaacatccgtctggagatatcccgttagaaatataaaaccaactaatattgagaaattcatccatggtggcattttgtatgctgcgtttctttggctcttctatcaaccacatatctgcgacggagcattttctatctttaatatctagattataacttattgtctcgtcaatgtctatagttctcatctttcccaacggcctcgcattaaatggaggaggagacaatgactgatatatttcgtccgtcactacgtaataaaagtaatgaggaaatcgtataaatacggtctcaccatttcgacatctggatttcagatataaaaatctgttttcaccgtgactttcaaaccaattaatgcaccgaacatccatttatagaatttagaaatatattttcatttaaatgaatcccaaacattggggaagagccgtatggaccattatttttatagtactttcgcaagcgggtttagacggcaacatagaagcgtgtaaacgaaaactatatactatagttagcactcttccatgtcctgcatgtagacggcacgcgactattgctatagaggacaataatgtcatgtctagcgatgatctgaattatatttattattttttcatcagattatttaacaatttggcatctgatcccaaatacgcaatcgatgtgtcaaaggttaaacctttataaacttaacccattataaaacttatgattagtcacgactgaaataaccgcgtgattattttttggtataattctacacggcatggtttctgtgactatgaattcaacccccgttacattagtgaaatctttaacaaacagcaagggttcgtcaaagacataaaactcattgtttacaatcgaaatagaccccctatcacacttaaaataaaaaatatccttatcctttaccaccaaataaaattctgattggtcaatgtgaatgtattcacttaacagttccacaaatttatttattaactccgaggcacatacatcgtcggtattttttatggcaaactttactcttccagcatccgtttctaaaaaaatattaacgagttccatttatatcatccaatattattgaaatgacgttgatggacagatgatacaaataagaaggtacggtacctttgtccaccatctcctccaattcatgctctattttgtcattaactttaatgtatgaaaacagtacgccacatgcttccatgacagtgtgtaacactttggatacaaaatgtttgacattagtataattgtttaagactgtcaatctataatagatagtagctataatatattctatgatggtattgaagaagatgacaatcttggcatattgatcatttaacacagacatggtatcaacagatagcttgaatgaaagagaatcagtaattggaataagcgtcttctcgatggagtgtccgtataccaacatgtctgatattttgatgtattccattaaattatttagttttttctttttattctcgttaaacagcatttctgtcaacggaccccaacatcgttgaccgattaagttttgattgatttttccgtgtaaggcgtatctagtcagatcgtatagcctatccaataatccatcatctgtgcgtagatcacatcgtacactttttaattctctatagaagagcgacagacatctggaacaattacagacagcaatttctttattctctacagatgtaagatacttgaagacattcctatgatgatgcagaattttggataacacggtattgatggtatctgttaccataattcctttgatggctgatagtgtcagagcacaagatttccaatctttgacaatttttagcaccattatctttgttttgatatctatatcagacagcatggtgcgtctgacaacacagggattaagacggaaagatgaaatgattctctcaacatcttcaatggataccttgctattttttctggcattatctatatgtgcgagaatatcctctagagaatcagtatcctttttgatgatagtggatctcaatgacatgggacgtctaaaccttcttattctatcaccagattgcatggtgatttgtcttctttcttttatcataatgtaatctctaaattcatcggcaaattgtctatatctaaaatcataatatgagatgtttacctctacaaatatctgttcgtccaatgttagagtatctacatcagttttgtattccaaattaaacatggcaacggatttaattttatattcctctattaagtcctcgtcgataataacagaatgtagataatcatttaatccatcgtacatggttggaagatgcttgttgacaaaatctttaattgtcttgatgaaggtgggactatatctaacatcttgattaataaaatttataacattgtccataggatactttgtaactagttttatacacatctcttcatcggtaagtttagacagaatatcgtgaacaggtggtatattatattcatcagatatacgaagaacaatgtccaaatctatattgtttaatatattatatagatgtagtgtagctcctacaggaatatctttaactaagtcaatgatttcatcaaccgttagatctattttaaagttaatcatataggcattgatttttaaaaggtatgtagccttgactacattctcattaattaaccattccaagtcactgtgtgtaagaagattatattctatcataagcttgactacatttggtcccgataccattaaagaattcttatgatataaggaaacagcttttaggtactcatctactctacaagaattttggagagccttaacgatatcagtgacgtttattatttcaggaggaaaaaacctaacattgagaatgtcggagttaatagcttccagatacagtgattttggcaatagtccgtgtaatccataatccagtaacacgagctggtgcttgctagacaccttttcaatgtttaatttttttgaaataagctttgataaagccttcctcgcaaattccggatacatgaacatgtcggcgacatgattaagtattgttttttcattatttttatattttctcaacaagttctcaataccccaatagatgatagaatatcacccaatgcgtccatgttgtctatttccaacaggtcgctatatccaccaatagaagttttcccaaaaaagattctaggaacagttctaccaccagtaatttgttcaaaataatcccgcaattcattttcgggtttaaattctttaatatcgacaatttcatacgctcctcttttgaaactaaacttatttagaatatccagtgcatttctacaaaaaggacatgtatacttgacaaaaattgtcactttgttattggccaacctttgttgtacaaattcctcggccattttaatatttaagtgatataaaactatctcgacttatttaactctttagtcgagatatatggacgcagatagctatatgatagccaactacagaaggcaaacgctataaaaaacataattacgacgagcatatttataaatatttttattcagcattacttgatatagtaatattaggcacagtcaaacattcaaccactctcgatacattaactctctcattttctttaacaaattctgcaatatcttcgtaaaaagattcttgaaactttttagaatatctatcgactctagatgaaatagcgttcgtcaacatactatgttttgtatacataaaggcgcccattttaacagtttctagtgacaaaatgctagcgatcctaggatcctttagaatcacatagattgacgattcgtctctcttagtaactctagtaaaataatcatacaatctagtacgcgaaataatattatccttgacttgaggagatctaaacaatctagttttgagaacatcgataagttcatcgggaatgacatacatactatctttaatagaactcttttcatccagttgaatggattcgtccttaaccaactgattaatgagatcttctattttatcattttccagatgatatgtatgtccattaaagttaaattgtgtagcgcttctttttagtctagcagccaatactttaacatcactaatatcgatatacaaaggagatgatttatctatggtattaagaattcgtttttcgacatccgtcaaaaccaattcctttttgcctgtatcatccagttttccatcctttgtaaagaaattattttctactagactattaataagactgataaggattcctccataattgcacaatccaaactttttcacaaaactagactttacgagatctacaggaatgcgtacttcaggtttcttagcttgtgattttttcttttgcggacattttcttgtgaccaactcatctaccatttcattgattttagcagtgaaataagctttcaatgcacgggcactgatactattgaaaacgagttgatcttcaaattccgccatttaagttcaccaaacaacttttaaatacaaatatatcaatagtagtagaataagaactataaaaaaaataataattaaccaataccaaccccaacaaccggtattattagttgatgtgactgttttctcatcacttagaacagatttaacaatttctataaagtctgtcaaatcatcttccggagaccccataaatacaccaaatatagcggcgtacaacttatccatttatacattgaatattggcttttctttatcgctatcttcatcatattcatcatcaatatcaacaagtcccagattacgagccagatcttcttctacattttcagtcattgatacacgttcactatctccagagagtccgataacgttagccaccacttctctatcaatgattagtttcttgagtgcgaatgtaatttttgtttccgttccggatctatagaagacgataggtgtgataattgccttggccaattgtctttctcttttactgagtgattctagttcaccttctatagatctgagaatggatgattctccagccgaaacatattctaccatggctccgtttaatttgttgatgaagatggattcatccttaaatgttttctctgtaatagtttccaccgaaagactatgcaaagaatttggaatgcgttccttgtgcttaatgtttccatagacggcttctagaagttgatacaacataggactagccgcggtaacttttatttttagaaagtatccatcgcttctatcttgtttagatttatttttataaagtttagtctctccttccaacataataaaagtggaagtcatttgactagataaactatcagtaagttttatagagatagacgaacaattagcgtattgagaagcatttagtgtaacgtattcgatacattttgcattagatttactaatcgattttgcatactctataacacccgcacaagtctgtagagaatcgctagatgcagtaggtcttggtgaagtttcaactctcttcttgattaccttactcatgattaaacctaaataattgtactttgtaatataatgatatatattttcactttatctcatttgagaataaaaatgtttttgtttaaccactgcatgatgtacagatttcggaatcgcaaaccaccagtggttttattttatccttgtccaatgtgaattgaatgggagcggatgcgggtttcgtacgtagatagtacattcccgtttttagaccgagactccatccgtaaaaatgcatactcgttagtttggaataactcggatctgctatatggatattcatagattgactttgatcgatgaaggctcccctgtctgcagccatttttatgatcgtcttttgtggaatttcccaaatagttttataaactcgcttaatatcttctggaaggtttgtattctgaatggatccaccatctgccataatcctattcttgatctcatcattccataattttctctcggttaaaactctaaggagatgcggattaactacttgaaattctccagacaatactctccgagtgtaaatattactggtatacggttccaccgactcattatttcccaaaatttgagcagttgatgcagtcggcataggtgccaccaataaactatttctaagaccgtatgttctgattttatcttttagaggttcccaattccaaagatccgacggtacaacattccaaagatcatattgtagaataccgttactggcgtacgatcctacatatgtatcgtatggtccttccttctcagctagttcacaactcgcctctaatgcaccgtaataaatggtttcgaagatcttcttatttagatcttgtgcttccaggctatcaaatggataatttaagagaataaacgcgtccgctaatccttgaacaccaataccgataggtctatgtctcttattagagatttcagcttctggaataggataataattaatatctataattttattgagatttctgacaattactttgaccacatccttcagtttgagaaaatcaaatcgcccatctattacaaacatgttcaaggcaacagatgccagattacaaacggctacctcattagcatccgcatattgtattatctcagtgcaaagattactacacttgatagttcctaaattttgttgattactctttttgttacacgcatccttataaagaatgaatggagtaccagtttcaatctgagattctataatcgctttccagacgactcgagcctttattatagatttgtatctcctttctctttcgtatagtgtatacaatcgttcgaactcgtctccccaaacattgtccaatccaggacattcatccggacacatcaacgaccactctccgtcatccttcactcgtttcataaagagatcaggaatccaaagagctataaatagatctctggttctatgttcctcgtttcctgtattctttttaagatcgaggaacgccataatatcagaatgccacggttccaagtatatggccataactccaggccgtttgtttcctccctgatctatgtatctagcggtgttattataaactctcaacattggaataataccgtttgatataccattggtaccggagatatagcttccactggcacgaatattactaattgatagacctattccccctgccattttagagattaatgcgcatcgttttaacgtgtcatagataccctctatgctatcatcgatcatgttaagtaaaaaacagctagacatttggtgacgactagttcccgcattaaataaggtaggagaagcgtgcgtaaaccatttttcagaaagtagattgtacgtctcaatagctgagtctatatcccattgatgaattcctactgcgacacgcattaacatgtgctgaggtctttcaacgatcttgttgtttattttcaacaagtaggatttttccaaagttttaaaaccaaaatagttgtatgaaaagtctcgttcgtaaataataaccgagttgagtttatccttatatttgttaactatatccatggtgatacttgaaataatcggagaatgtttcccatttttaggattaacatagttgaataaatcctccatcacttcactaaatagtttttttgtttccttgtgtagatttgatacggctattctggcggctagaatggcataatccggatgttgtgtagtacaagtggctgctatttcggctgccagagtgtccaattctaccgttgttactccattatatattccttgaataaccttcatagctattttaataggatctatatgatccgtgtttaagccataacataattttctaatacgagacgtgattttatcaaacatgacattttccttgtatccatttcgtttaatgacaaacatttttgttggtgtaataaaaaaattatttaacttttcattaatagggatttgacgtatgtagcgtacaaaattatcgttcctggtatatagataaagagtcctatatatttgaaaatcgttacggctcgattaaactttaatgattgcatagtgaatatatcattaggatttaactccttgactatcatggcggcgccagaaattaccatcaaaagcattaatacagttatgccgatcgcagttagaacggttatagcatccaccatttatatctaaaaattagatcaaagaatatgtgacaaagtcctagttgtatactgagaattgacgaaacaatgtttcttacatatttttttcttattagtaactgacttaatagtaggaactggaaagctagacttgattattctataagtatagatacccttccagataatgttctctttgataaaagttccagaaaatgtagaattttttaaaaagttatcttttgctattaccaagattgtgtttagacgcttattattaatatgagtaatgaaatccacaccgcctctagatatcgcctttatttccacattagatggtaaatccaatagtgaaactatctttttaggaatgtatggactcgcgtttagaggagtgaacgtcttgggcgtcggaaaggatgattcgtcaaacgaataaacaatttcacaaatggatgttaatgtattagtaggaaatttcttgacgctagtggagttgaagattctaatggatgatgttctacctatttcatccgataacatgttaatttccgacaccaacggttttaatatttcgatgatatacggtagtctctctttcggacttatatagcttattccacaatacgagtcattatatactccaaaaaacaaaataactagtataaaatctgtatcgaatgggaaaaacgaaattatcgacataggtatagaatccggaacattgaacgtattaatacttaattctttttctgtggtaagtaccgataggttattgacattgtatggttttaaatattctataacttgagacttgatagatattagtgatgaattgaaaattatttttatcaccacgtgtgtttcaggatcatcgtcgacgcccgtcaaccaaccgaatggagtaaaataaatatcattaatatatgctctagatattagtatttttatcaatcctttgattatcatcttctcgtaggcgaatgattccatgatcaagagtgatttaagaacatcctccggagtattaatgggcttagtaaacagtccatcgttgcaataataaaagttatccaagttaaaggatattatgcattcgtttaaagatatcacctcatctgacggagacaattttttggtaggttttagagactttgaagctacttgtttaacaaagttattcatcgtcgtctactattctatttaattttgtagttaatttatcacatatcacattaattgactttttggtccatttttccatacgtttatattcttttaatcctgcgttatccgtttccgttatatccagtgatagatcgtgcaggttaaatagaatgctcttaaataatgtcatttttttatccgctaaaaatttaaagaatgtataaacctttttcagagatttgaaactcttaggtggtgtcctagtacacaatatcataaacaaactaataaacattccacattcagattccaacagctgattaacttccacattaatacagcctattttcgctccaaatgtacattcgaaaaatctgaataaaacatcgatgtcacaatttgtattatccaatacagaatgtctgtgattcgtgttaaaaccatcggagaaggaatagaaataaaaattattatagtggtggaattcagttggaatattgcctccggagtcataaaaggatactaaacattgttttttatcataaattacacatttccaatgagacaaataacaaaatccaaacattacaaatctagaggtagaacttttaattttgtctttaagtatatacgataagatatgtttattcataaacgcgtcaaatttttcatgaatcgctaaggagtttaagaatctcatgtcaaattgtcctatataatccacttcggatccataagcaaactgagagactaagttcttaatacttcgattgctcatccaggctcctctctcaggctctattttcatcttgacgacctttggattttcaccagtatgtattcctttacgtgataaatcatcgattttcaaatccatttgtgagaagtctatcgccttagatactttttcccgtagtcgaggtttaaaaaaatacgctaacggtatactagtaggtaactcaaagacatcatatatagaatggtaacgcgtctttaactcgtcggttaactctttcttttgatcgagttcgtcgctactattgggtctgctcaggtgccccgactctactagttccaacatcataccgataggaatacaagacactttgccggcggttgtagatttatcatatttctccactacatatccgttacaatttgttaaaaatttagatacatctatattgctacataatccagctagtgaatatatatgacataataaattggtaaatcctagttctggtattttactaattactaaatctgtatatctttccatttatcatggaaaagaatttaccagatatcttcttttttccaaactgcgttaatgtattctcttacaaatattcacaagatgaattcagtaatatgagtaaaacggaacgtgatagtttctcattggccgtgtttccagttataaaacatagatggcataacgcacacgttgtaaaacataaaggaatatacaaagttagtacagaagcacgtggaaaaaaagtatctcctccatcactaggaaaacccgcacacataaacctaaccacgaaacaatatatatacagtgaacacacaataagctttgaatgttatagttttctaaaatgtataacaaatacagaaatcaattcgttcgatgagtatatattaagaggactattagaagctggtaatagtttacagatattttccaattccgtaggtaaacgaacagatactataggtgtactagggaataagtatccatttagcaaaattccattggcctcattaactcctaaagcacaacgagagatattttcagcgtggatttctcatagacctgtagttttaactggaggaactggagtgggtaagacgtcacaggtacccaagttattgctttggtttaattatttatttggtggattctctactctagataaaatcactgactttcacgaaagaccagtcattctatctcttcctaggatagctttagttagattgcatagcaataccattttaaaatcattgggatttaaggtactagatggatctcctatttctttacggtacggatctataccggaagaattaataaacaaacaaccaaaaaaatatggaattgtattttctacccataagttatctctaacaaaactatttagttatggcactcttattatagacgaagttcatgagcatgatcaaataggagatattattatagcagtagcgagaaagcatcatacgaaaatagattctatgtttttaatgactgccacgttagaggatgacagggaacggctaaaagtatttttacctaatcccgcatttatacatattcctggagatacactgtttaaaattagcgaggtatttattcataataagataaatccatcttccagaatggcatacatagaagaagaaaagagaaatttagttactgctatacagatgtatactcctcctgatggatcatccggtatagtctttgtggcatccgttgcacagtgtcacgaatataaatcatatttagaaaaaagattaccgtatgatatgtatattattcatggtaaggtcttagatatagacgaaatattagaaaaagtgtattcatcacctaatgtatcgataattatttctactccttatttggaatccagcgttactatacgcaatgttacacacatttatgatatgggtagagtttttgtccccgctccttttggaggatcgcaagaatttatttctaaatctatgagagatcaacgaaaaggaagagtaggaagagttaatcctgggacatacgtatatttctatgatctgtcttatatgaagtctatacagcgaatagattcagaatttctacataattatatattgtacgctaataagtttaatctaacactccccgaagatttgtttataatccctacaaatttggatattctatggcgtacaaaggaatatatagactcgttcgatattagtacagaaacatggaataaattattatccaattattatatgaagatgatagagtatgctaaactttatgtactaagtcctattctcgctgaggagttggataactttgagaggacgggagaattaactagtattgtacgagaagccattttatctctaaatttacgaattaagattttaaattttaaacataaagatgatgatacgtatatacacttttgtaaaatattattcggtgtctataacggaacaaacgctactatatattatcatagacctctaacgggatatatgaatatgatttcagatactatatttgttcctgtagataataactaaaaatcaaactctaatgaccacatctttttttagagatgaaaaattttccacatctccttttgtagacacgactaaacattttgcagaaaaaagtttattagtgtttagataatcgtatacttcatcagtgtagatagtaaatgtgaacagataaaaggtattcttgctcaatagattggtaaattccatagaatatattaatcctttcttcttgagatcccacatcatttcaaccagagacgttttatccaatgatttacctcgtactataccacatacaaaactagattttgcagtgacgtcgtacctggtattcctaccaaacaaaattttacttttagttcttttagaaaattctaaggtagaatctctatttgccaatatgtcatctatggaattaccactagcaaaaaatgatagaaatatatattgatacatcgcagctggttttgatctactatactttaaaaacgaatcagattccataattgcctgtatatcatcagctgaaaaactatgttttacacgtattccttcggcatttctttttaatgatatatcttgtttagacaatgataaagttatcatgtccatgagagacgcgtctccgtatcgtataaatatttcattagatgttagacgcttcattaggggtatacttctataaggtttcttaatcagtccatcattggttgcgtcaagaactactatcggatgttgttgggtatctctagtgttacacatggccttactaaagtttgggtaaataactatgatatctctattaattatagatgcatatatttcattcgtcaaggatattagtatcgacttgctatcgtcattaatacgtgtaatgtaatcatataaatcatgcgatagccaaggaaaattcaaatagatgttcatcatataatcgtcgctataattcatattaatactttgacattgactaatttgtaatatagcctcgccacgaagaaagctctcgtattcagtttcatcgataaaggataccgttaaatataactggttgccgatagtctcatagtctattaagtggtaagtttcgtacaaatacagaatccctaaaatattatctaatgttggattaatctttaccataactgtataaaatggagacggagtcataactattttaccgtttgtacttactggaatagatgaaggaataatctccggacatgctggtaaagacccaaatgtctgtttgaagaaatccaatgttccaggtcctaatctcttaacaaaaattacgatattcgatcccgatatcctttgcattctatttaccagcatatcacgaactatattaagattatctatcatgtctattctcccaccgttatataaatcgcctccgctaagaaacgttagtatatccatacaatggaatacttcatttctaaaatagtattcgttttctaattctttaatgtgaaatcgtatactagaaagggaaaaattatctttgagttttccgttagaaaagaaccacgaaactaatgttctgattgcgtccgattccgttgctgaattaatggatttacaccaaaaactcatataacttctagatgtagaagcattcgctaaaaaattagtagaatcaaaggatataagtagatgttccaacaagtgagcaattcccaagatttcatctatatcattctcgaatccgaaattagaaattcccaagtagatatcctttttcatccgatcattgatgaaaatacgaactttattcggtaagacaatcatttactaaggagtaaaataggaagtaatgttcgtatgtcgttatcatcgtataaattaaaggtgtgttttttaccattaagtgacattataattttaccaatattggaattataatataggtgtatttgcgcactcgcgacggttgatgcatcggtaaatatagctgtatctaatgttctagtcggtatttcatcatttcgctgtctaataatagcgttttctctatctgtttccattacagctgcctgaagtttattggtcggataatatgtaaaataataagaaatacatacgaataacaaaaataaaataagatataataaagatgccatttagagatctaattttgttcaacttgtccaaattcctacttacagaagatgaggaatcgttggagatagtgtcttccttatgtagaggatttgaaatatcttatgatgacttgataacttactttccagataggaaataccataaatatatttctaaagtatttgaacatgtagatttatcggaggaattaagtatggaattccatgatacaactttgcgagatttagtttatcttagattgtacaagtattccaagtgtatacggccgtgttataaattaggagataatctaaaaggcatagttgttataaaggacaggaatatttatattagggaagcaaatgatgacttgatagaatatctcctcaaggaatacactcctcagatttatacatattctaatgagcgcgtccccataactggttcaaaattaattctttgtggattttctcaagttacatttatggcgtatacaacgtcgcatataacaacaaataaaaaggtagatgttctcgtttccaaaaaatgtatagatgaactagtcgatccaataaattatcaaatacttcaaaatttatttgataaaggaagcggaacaataaacaaaatactcaggaagatattttattcggtaacaggtggccaaactccataggtagctttttctatttcggattttagaatttccaaattcaccagcgatttatcggttttggtgaaatccaaggatttattaatgtccacaaatgccatttgttttgtctgtggattgtatttgaaaatggaaacgatgtagttagatagatgcgctgcgaagtttcctattagggttccgcgcttcacgtcacccagcatacttgaatcaccatcctttaaaaaaaatgataagatatcaacatggagtatatcatactcggattttaattcttctactgcatcactgacattttcacaaatactacaatacggtttaccgaaaataatcagtacgttcttcatttatgggtatcaaaaacttaaaatcgttactgctggaaaataaatcactgacgatattagatgataatttatacaaagtatacaatggaatatttgtggatacaatgagtatttatatagccgtcgccaattgtgtcagaaacttagaagagttaactacggtattcataaaatacgtaaacggatgggtaaaaaagggagggcatgtaaccctttttatcgatagaggaagtataaaaattaaacaagacgttagagacaagagacgtaaatattctaaattaaccaaggacagaaaaatgctagaattagaaaagtgtacatccgaaatacaaaatgttaccggatttatggaagaagaaataaaggcagaaatgcaattaaaaatcgataaactcacatttcaaatatatttatctgattctgataacataaaaatatcattgaatgagatactaacacatttcaacaataatgagaatgttacattattttattgtgatgaacgagacgcagaattcgttatgtgtctcgaggctaaaacacatttctctaccacaggagaatggccgttgataataagtaccgatcaggatactatgctatttgcatctactgataatcatcctaagatgataaaaaacttaactcaactgtttaaatttgttccctcggcagaggataactatttagcaaaattaacggcgttagtgaatggatgtgatttctttcctggactctatggggcatctataacacccaacaacttaaacaaaatacaattgtttagtgattttacaatcgataatatagtcactagtttggcaattaaaaattattatagaaagactaactctaccgtagacgtgcgtaatattgttacgtttataaacgattacgctaatttagacgatgtctactcgtatgttcctccttgtcaatgcactgttcaagaatttatattttccgcattagatgaaaaatggaacaattttaaatcatcttatttagagaccgttccgttaccctgtcaattaatgtacgcgttagaaccacgcaaggagattgatgtttcagaagttaaaactttatcatcttatatagatttcgaaaatactaaatcagatatcgatgttataaaatctatatcctcgatcttcggatattctaacgaaaactgtaacacgatagtattcggcatctataaggataatttactactgagtataaataattcattttactttaacgatagtctgttaataaccaatactaaaagtgataatataataaatataggttactagattaaaaatggtgttccaactcgtgtgctctacatgcggtaaagatatttctcacgaacgatataaattgattatacgaaaaaaatcattaaaggatgtactcgtcagtgtaaagaacgaatgttgtaggttaaaattatctacacaaatagaacctcaacgtaacttaacagtgcaacctctattggatataaactaatatggatccggttaattttatcaagacatatgcgcctagaggttctattatttttattaattataccatgtcattaacaagtcatttgaatccatcgatagaaaaacatgtgggtatttattatggtacgttattatcggaacacttggtagttgaatctacctatagaaaaggagttcgaatagtcccattggatagtttttttgaaggatatcttagtgcaaaagtatacatgttagagaatattcaagttatgaaaatagcagctgatacgtcattaactttattgggtattccgtatggatttggtcataatagaatgtattgttttaaattggtagctgactgttataaaaatgccggtgttgaaacatcgtctaaacgaatattaggtaaagatatttttctgagccaaaacttcacagacgataatagatggataaagatatatgattctaataatttaacattttggcaaattgattaccttaaagggtgagttaatatgcataactactcctccgttgttttttccctcgttctttttcttaacgttgtttgccatcactctcataatgtaaagatattctaaaatggtaaacttttgcatatcggacgcagaaattggtataaatgttgtaattgtattatttcccgtcaatggactagtcacagctccatcagttttatatcctttagagtatttctcactcgtgtctagcattctagagcattccatgatctgtttatcgttgatattggccggaaagatagattttttattttttattatattactattggcaattgtagatataacttctggtaaatatttttctaccttttcaatttcttctattttcaagccggctatatattctgctatattgttgctagtatcaataccttttctggctaagaagtcatatgtggtattcactatatcagttttaactggtagttccattagcctttccacttctgcagaataatcagaaattggttctttaccagaaaatccagctactataataggctcaccgatgatcattggcaaaatcctatattgtaccagattaatgagagcatatttcatttccaataattctgctagttcttgagacattgatttatttgatgaatctagttggttctctagatactctaccatttctgccgcatacaataacttgttagataaaatcagggttatcaaagtgtttagcgtggctagaatagtgggcttgcatgtattaaagaatgcggtagtatgagtaaaccgttttaacgaattatatagtctccagaaatctgtggcgttacatacatgagccgaatgacatcgaagattgtccaatatttttaatagctgctctttgtccattatttctatatttgactcgcaacaattgtagataccattaatcactgattcctttttcgatgccggacaatagcacaattgtttagctttggactctatgtattcagaattaatagatatatctcttaatacagattgcactatacattttgaaactatgtcaaaaattgtagaacgacgctgttctgcagccatttaactttaaataatttacaaaaatttaaaatgagcatccgtataaaaatcgataaactgcgccaaattgtggcatatttttcagagttcagtgaagaagtgtctataaatgtagactcgacggatgagttaatgtatatttttgccgccttgggcggatctgtaaacatttgggccattatacctctcagtgcatcagtgttctaccgaggagccgaaaacattgtgtttaatcttcctgtgtccaaggtaaaatcgtgtttgtgtagttttcacaatgatgccatcatagatatagaacctgatctggaaaataatctagtaaaactttctagttatcatgtagtaagtgtcgattgtaataaggaactgatgcctattaggacagatactactatttgtctaagtatagatcaaaagaaatcttatgtgtttaattttcacaagtatgaagaaaaatgttgtggtagaaccgtcattcatttagaatggttgttgggctttatcaagtgtattagtcagcatcagcatctggctattatgtttaaagatgacaatattattatgaagactcctggtaatactgatgcattttccagggaatattctatgactgaatgttctcaagaactacaaaagttttctttcaaaatagctatctcgtctctcaacaaactacgaggattcaaaaagagagtcaatgtttttgaaactagaatcgtaatggataatgacgataacattctaggaatgttgttttcggatagagttcaatcctttaagatcaacatctttatggcgtttttagattaatactttcaatgagataaatatgggtggcggagtaagtgttgagctccctaaacgggatccgcctccgggagtacccactgatgagatgttattaaacgtggataaaatgcatgacgtgatagctcccgctaagcttttagaatatgtgcatataggaccactagcaaaagataaagaggataaagtaaagaaaagatatccagagtttagattagtcaacacaggacccggtggtctttcggcattgttaagacaatcgtataatggaaccgcacccaattgctgtcgcacttttaatcgtactcattattggaaaaaggatggaaagatatcagataagtatgaagagggtgcagtattagaatcgtgttggccagacgttcacgacactggaaaatgcgatgttgatttattcgactggtgtcagggggatacgttcgatagaaacatatgccatcagtggatcggttcagcctttaataggagtaatagaactgtagagggtcaacaatcgttaataaatctgtataataagatgcaaacattatgtagtaaagatgctagtgtaccaatatgtgaatcatttttgcatcatttacgcgcacacaatacagaagatagcaaagagatgatcgattatattctaagacaacagtctgcggactttaaacagaaatatatgagatgtagttatcccactagagataagttagaagagtcattaaaatatgcggaacctcgagaatgttgggatccagagtgttcgaatgccaatgttaatttcttgctaacacgtaattataataatttaggactttgcaatattgtacgatgtaatactagcgtgaacaacttacagatggataaaacttcctcattaagattgtcatgtggattaagcaatagtgatagattttctactgttcccgtcaatagagcaaaagtagttcaacataatattaaacactcgttcgacctaaaattgcatttgatcagtttattatctctcttggtaatatggatactaattgtagctatttaaatgggtgccgcagcaagcatacagacgacggtgaatacactcagcgaacgtatctcgtctaaattagaacaagaagcgaatgctagtgctcaaacaaaatgtgatatagaaatcggaaatttttatatccgacaaaaccatggatgtaacctcactgttaaaaatatgtgctctgcggacgcggatgctcagttggatgctgtgttatcagccgctacagaaacatatagtggattaacaccggaacaaaaagcatacgtgccagctatgtttactgctgcgttaaacattcagacgagtgtaaacactgttgttagagattttgaaaattatgtaaaacaaacttgtaattctagcgcggtcgtcgataacaaattaaagatacaaaacgtaatcatagatgaatgttacggagccccaggatctccaacaaatttggaatttattaatacaggatctagcaaaggaaattgtgccattaaggcgttgatgcaattgactactaaggccactactcaaatagcacctagacaagttgctggtacaggagttcagttttatatgattgttatcggtgttataatattggcagcgttgtttatgtactatgccaagcgtatgctgttcacatccaccaatgataaaatcaaacttattttagccaataaggaaaacgtccattggactacttacatggacacattctttagaacttctccgatggttattgctaccacggatatgcaaaactgaaaatatattgataatattttaatagattaacatggaagttatcgctgatcgtctagacgatatagtgaaacaaaatatagcggatgaaaaatttgtagattttgttatacacggtctagagcatcaatgtcctgctatacttcgaccattaattaggttgtttattgatatactattatttgttatagtaatttatatttttacggtacgtctagtaagtagaaattatcaaatgttgttggcgttggtggcgctagtcatcacattaactattttttattactttatactataatagtactagactgacttctaacaaacatctcacctgccataaataaatgcttgatattaaagtcttctatttctaacactattccatctgtggaaaataatactctgacattatcgctaattgacacatcggtgagtgatatgcctataaagtaataatcttctttgggcacatataccagtgtaccaggttctaacaacctatttactggtgctcctgtagcatactttttctttaccttgagaatatccatcgtttgcttggtcaatagcgatatgtgattttttatcaaccactcgaaaaagtaattggagtgttcatatcctctacgggctattgtctcatggccgtgtatgaaatttaagtaacacgactgtggtagatttgttctatagagccggttgccgcaaatagatagaactaccaatatgtctgtacaaatgttaaacattaattgattaacagaaaaaacaatgttcgttctgggaatagaaaccagatcaaaacaaaattcgttagaatatatgccacgtttatacattgaatataaaataactacagtttgaaaaataacagtatcatttaaacatttaacttgcggggttaatttcacaactttactgtttttaaactgttcaaaatatagcatcgatccatgagaaatacgtttagccgcctttaatagaggaaatcccaccgcctttctggatctcaccaacgacgatagttctgaccagcaactcatttcttcatcatccacctgttttaacatataataggcaggagatagatatccgtcattgcaatattccttttcgtaggcacacaatctaatattgataaaatctccattctcttctctgcatttattatcttgtttcggtggctgattaggctgtagtcttggtttaggccttggtctatcgttgttgaatctattttggtcattaaatctttcatttcttcctggtatatttctatcacctcgtttggttggatttttgtctatattatcgtttgtaacatcggtacgggtattcatttatcacaaaaaaaacttctctaaatgagtctactgctagaaaacctcatcgaagaagataccatattttttgcaggaagtatatctgagtatgatgatttacaaatggttattgccggcgcaaaatccaaatttccaagatctatgctttctatttttaatatagtacctagaacgatgtcaaaatatgagttggagttgattcataacgaaaatatcacaggagcaatgtttaccacaatgtataatataagaaacaatttgggtctaggagatgataaactaactattgaagccattgaaaactatttcttggatcctaacaatgaagttatgcctcttattattaataatacggatatgactgccgtcattcctaaaaaaagtggtaggagaaagaataagaacatggttatcttccgtcaaggatcatcacctatcttgtgcattttcgaaactcgtaaaaagattaatatttataaagaaaatatggaatccgcatcgactgagtatacacctatcggagacaacaaggctttgatatctaaatatgcgggaattaatgtcctgaatgtgtattctccttccacatccatgagattgaatgccatttacggattcaccaataaaaataaactagagaaacttagtactaataaggaactagaatcgtatagttctagccctcttcaagaacccattaggttaaatgattttctgggactattggaatgtgttaaaaagaatattcctctaacagatattccgacaaaggattgattactataaatggagaatgttcctaatgtatactttaatcctgtgtttatagagcccacgtttaaacattctttattaagtgtttataaacacagattaatagttttatttgaagtattcgttgtattcattctaatatatgtattttttagatctgaattaaatatgttcttcatgcctaaacgaaaaatacccgatcctattgatagattacgacgtgctaatctagcgtgtgaagacgataaattaatgatctatggattaccatggatgacaactcaaacatctgcgttatcaataaatagtaaaccgatagtgtataaagattgtgcaaagcttttgcgatcaataaatggatcacaaccagtatctcttaacgatgttcttcgcagatgatgattcattttttaagtatttggctagtcaagatgatgaatcttcattatctgatatattgcaaatcactcaatatctagactttctgttattattattgatccaatcaaaaaataaattagaagccgtgggtcattgttatgaatctctttcagaggaatacagacaattgacaaaattcacagactctcaagattttaaaaaactgtttaacaaggtccctattgttacagatggaagggtcaaacttaataaaggatatttgttcgactttgtgattagtttgatgcgattcaaaaaagaatcctctctagctaccaccgcaatagatcctattagatacatagatcctcgtcgcgatatcgcattttctaacgtgatggatatattaaagtcgaataaagtgaacaataattaattctttattgtcatcatgaacggcggacatattcagttgataatcggccccatgttttcaggtaaaagtacagaattaattagacgagttagacgttatcaaatagctcaatataaatgcgtgactataaaatattctaacgataatagatacggaacgggactatggacgcatgataagaataattttgaagcattggaagcaactaaactatgtgatgtcttggaatcaattacagatttctccgtgataggtatcgatgaaggacagttctttccagacattgttgaattctgtgagcgtatggcaaacgaaggaaaaatagttatagtagccgcactcgatgggacatttcaacgtaaaccgtttaataatattttgaatcttattccattatctgaaatggtggtaaaactaactgctgtgtgtatgaaatgctttaaggaggcttccttttctaaacgattgggtgaggaaaccgagatagaaataataggaggtaatgatatgtatcaatcggtgtgtagaaagtgttacatcgactcataatattatattttttatctaaaaaactaaaaataaacattgattaaattttaatataatacttaaaaatggatgttgtgtcgttagataaaccgtttatgtattttgaggaaattgataatgagttagattacgaaccagaaagtgcaaatgaggtcgcaaaaaaactgccgtatcaaggacagttaaaactattactaggagaattattttttcttagtaagttacagcgacacggtatattagatggtgccaccgtagtgtatataggatcggctcctggtacacatatacgttatttgagagatcatttctataatttaggaatgattatcaaatggatgctaattgacggacgccatcatgatcctattctaaatggattgcgtgatgtgactctagtgactcggttcgttgatgaggaatatctacgatccatcaaaaaacaactgcatccttctaagattattttaatttctgatgtaagatccaaacgaggaggaaatgaacctagtacggcggatttactaagtaattacgctctacaaaatgtcatgattagtattttaaaccccgtggcatctagtcttaaatggagatgcccgtttccagatcaatggatcaaggacttttatatcccacacggtaataaaatgttacaaccttttgctccttcatattcagctgaaatgagattattaagtatttataccggtgagaacatgagactgactcgagttaccaaatcagacgctgtaaattatgaaaaaaagatgtactaccttaataagatcgtccgtaacaaagtagttgttaactttgattatcctaatcaggaatatgactattttcacatgtactttatgctgaggaccgtgtactgcaataaaacatttcctactactaaagcaaaggtactatttctacaacaatctatatttcgtttcttaaatattccaacaacatcaactgaaaaagttagtcatgaaccaatacaacgtaaaatatctagcaaaaattctatgtctaaaaacagaaatagcaagagatccgtacgcggtaataaatagaaacgtactactgagatatactaccgatatagagtataatgatttagttactttaataaccgttagacataaaattgattctatgaaaactgtgtttcaggtatttaacgaatcatccataaattatactccggttgatgatgattatggagaaccaatcattataacatcgtatcttcaaaaaggtcataacaagtttcctgtaaattttctatacatagatgtggtaatatctgacttatttcctagctttgttagactagatactacagaaactaatatagttaatagtgtactacaaacaggcgatggtaaaaagactcttcgtcttcccaaaatgttagagacggaaatagttgtcaagattctctatcgccctaatataccattaaaaattgttagatttttccgcaataacatggtaactggagtagagatagccgatagatctgttatttcagtcgctgattaatcaattagtagagatgagataagaacattataataatcaataatatatcttatatcttatatcttatatcttgtttagaaaaatgctaatattaaaatagctaacgctagtaatccaatcggaagccatttgatatctataatagggtatctaatttcctgatttaaatagcggacagctatattctcggtagctactcgtttggaatcacaaacattatttacatctaatttactatctgtaatggaaacgtttcccaatgaaatggtacaatccgatacattgcattttgttatatttttttttaaagaggctggtaacaacgcatcgcttcgtttacatggctcgtaccaacaataatagggtaatcttgtatctattcctatccgtactatgcttttatcaggataaatacatttacatcgtatatcgtctttgttagcatcacagaatgcataaatttgttcgtccgtcatgataaaaatttaaagtgtaaatataactattatttttatagttgtaataaaaagggaaatttgattgtatactttcggttctttaaaagaaactgacttgataaaaatggctgtaatctctaaggttacgtatagtctatatgatcaaaaagagattaatgctacagatattatcattagtcatgttaaaaatgacgacgatatcggtaccgttaaagatggtagactaggtgctatggatggggcattatgtaagacttgtgggaaaacggaattggaatgtttcggtcactggggtaaagtaagtatttataaaactcatatagttaagcctgaatttatttcagaaattattcgtttactgaatcatatatgtattcactgcggattattgcgttcacgagaaccgtattccgacgatattaacctaaaagagttatcgggacacgctcttaggagattaaaggataaaatattatccaagaaaaagtcatgttggaacagcgaatgtatgcaaccgtatcaaaaaattactttttcaaagaaaaaggtttgtttcgtcaacaagttggatgatattaacgttcctaattctctcatctatcaaaagttaatttctattcatgaaaagttttggccattattagaaattcatcaatatccagctaacttattttatacagactactttcccatccctccgctgattattagaccggctattagtttttggatagatagtatacccaaagagaccaatgaattaacttacttattaggtatgatcgttaagaattgtaacttgaatgctgatgaacaggttatccagaaggcggtaatagaatacgatgatattaaaattatttctaataacacttccagtatcaatttatcatatattacatccggcaaaaataatatgattagaagttatattgtcgcccgacgaaaagatcagaccgctagatctgtaattggtcccagtacatctatcaccgttaatgaggtaggaatgcccgcatatattagaaatacacttacagaaaagatatttgttaatgcctttacagtggataaagttaaacaactattagcgtcaaaccaagttaaattttactttaataaacgattaaaccaattaacaagaatacgccaaggaaagtttattaaaaataaaatacatttattgcctggtgattgggtagaagtagctgttcaagaatatacaagtattatttttggaagacagccgtctctacatagatacaacgtcatcgcttcatctatcagagctaccgaaggagatactatcaaaatatctcccggaattgccaactctcaaaatgctgatttcgacggagatgaagaatggatgatattggagcaaaatcctaaagccgtaattgaacaaagtattcttatgtatccgacgacgttactcaaacacgatattcatggagcccccgtttatggatctattcaagatgaaatcgtagcagcgtattcattgtttagaatacaagatctttgtttagatgaagtattgaacatcttggggaaatatggaagaaagttcgatcctaaaggtaaatgtaaattcagcggtaaagatatctatacttacttgataggtgaaaagattaattatccgggtctcttaaaggatggtgaaattattgcaaacgacgtagatagtaattttgttgtggctatgaggcatctgtcattggctggactcttatccgatcataagtcgaacgtggaaggtatcaactttattatcaagtcatcttatgtttttaagagatatctatctatttacggttttggggtgacattcaaagatctgagaccaaattcgacgttcactaataaattggaggccatcaacgtagaaaaaatagaacttatcaaagaagcatacgccaaatatctcaacgatgtaagagacgggaaaatagttccattatctaaagctttagaggcggactatgtggaatccatgttatccaacttgacaaatcttaatatccgagagatagaagaacatatgagacaaacgctgatagatgatccagataataacctcctgaaaatggccaaagcgggttataaagtaaatcccacagaactaatgtatattctaggtacttatggacaacagaggattgatggtgaaccagcagagactcgagtattgggtagagtcttaccttactatcttccagactctaaggatccagaaggaagaggttatattcttaattctttaacaaaaggattaacaggttctcaatattacttttcgatgctggttgccagatctcaatctactgatatcgtctgtgaaacatcacgtaccggaacactggctagaaaaatcattaaaaagatggaggatatggtggtcgacggatacggacaagtagttataggtaatacgctcatcaagtacgccgccaattataccaaaattctaggctcagtatgtaaacctgtagatcttatctatccagatgagtccatgacttggtatttggaaattagtgctctgtggaataaaataaaacagggattcgtttactctcagaaacagaaacttgcaaaaaagacattggcgccgtttaatttcctagtattcgtcaaacccaccactgaggataatgctattaaggttaaggatctgtacgatatgattcataacgtcattgatgatgtgagagagaaatacttctttacggtatctaatatagattttatggagtatatattcttgacgcatcttaatccttctagaattagaattacaaaagaaacggctatcactatctttgaaaagttctatgaaaaactcaattatactctaggtggtggaactcctattggaattatttctgcacaggtattgtctgagaagtttacacaacaagccctgtccagttttcacactactgaaaaaagtggtgccgtcaaacaaaaacttggtttcaacgagtttaataacctgactaatttgagtaagaataagaccgaaattatcactctggtatccgatgatatctctaaacttcaatctgttaagattaatttcgaatttgtatgtttgggagaattaaatccaaacatcactcttcgaaaagaaacagataggtatgtagtagatataatagtcaatagattatacatcaagagagcagaaattaccgaattagtcgtcgaatatatgattgaacgatttatctcctttagcgtcattgtaaaggaatggggtatggagacattcattgaggacgaggataatattagatttactgtctacctaaatttcgttgaaccggaagaattgaatcttagtaagtttatgatggttcttccgggtgccgccaacaagggcaagattagtaaattcaagattcctatctctgactatacgggatatgacgacttcaatcaaacaaaaaagctcaataagatgactgtagaactcatgaatctaaaagaattgggttctttcgatttggaaaacgtcaacgtgtatcctggagtatggaatacatacgatatcttcggtatcgaggccgctcgtgaatacttgtgcgaagccatgttaaacacctatggagaagggttcgattatctgtatcagccttgtgatcttctcgctagtttactatgtgctagttacgaaccagaatcagtgaataaattcaagttcggcgcagctagtactcttaagagagctacgttcggagacaataaagcattgttaaacgcggctcttcataaaaagtcagaacctattaacgataatagtagctgccacttttttagcaaggtccctaatataggaactggatattacaaatactttatcgacttgggtcttctcatgagaatggaaaggaaactatctgataagatatcttctcaaaagatcaaggaaatggaagaaacagaagacttttaattcttatcaataacatatttttctatgatctgtcttttaaacgatggattttccacaaatgcgcctctcaagtccctcatagaatgatacacgtataaaaaatatagcataggcgatgactccttatttttagacattagatatgccaaaatcatagccccgcttctatttactcccgcagcacaatgaaccaacacgggctcgtttcgttgatcacatttagataaaaaggcggtcacgtcgtcaaaatatttactaatatcggtagttgtatcatctaccaacggtatatgaataatattaatattagagttaggcaatgtatatttatccatcgtcaaatttaaaacatatttgaacttaacttcagatgatggtgcatccatagcatttttataatttcccaaatacacattattggttacccttgtcattatagtgggagatttggctttgtgcatatctccagttgaacgtagtagtaagtatttatacaaacttttcttatccatttataacgtacaaatggataaaactactttatcggtaaacgcgtgtaatttagaatacgttagagaaaaggctatagtaggcgtacaagcagccaaaacatcaacacttatattctttgttattatattggcaattagtgcgctattactctggtttcagacgtctgataatccagtctttaatgaattaacgagatatatgcgaattaaaaatacggttaacgattggaaatcattaacggatagcaaaacaaaattagaaagtgatagaggtaaacttctagccgctggtaaggatgatatattcgaattcaaatgtgtggatttcggcgcctattttatagctatgcgattggataagaaaacatatctgccgcaagctattaggcgaggtactggagacgcgtggatggttaaaaaggcggcaaaggtcgatccatctgctcaacaattttgtcagtatttgataaaacacaagtctaataatgttattacttgtggtaatgagatgttaaatgaattaggttatagcggttattttatgtcaccgcattggtgttccgattttagtaatatggaatagtgttagataaatgcggtaacaaatgttcctgtaaggaaccataacagcttagatttaacgttaaagatgagcataaacataataaacaaaattacaatcaaacctataacattaatatcaaacaatccaaaaaatgaaatcagtggagtagtaaacgcgtacataactcctggataacgtttagcagctgccgttcctattctagaccaaaaattcggtttcatgttttcgaagcggtgttctgcaacaagtcggggatcgtgttctacatatttggcggcattatccagtatctgcctattgatcttcatttcgttttcgattctggctatttcaaaataaaatcccgatgatagacctccagactttataatttcatctacgatgttcagcgccgtagtaactctaataatataggctgataagctaacatcataccctcctgtatatgtgaatatggtatgatttttgtccattacaagctcggttttaactttattgcctgtaataatttctctcatctgtaggatatctatttttttgtcatgcattgccttcaagacgggacgaagaaacgtaatatcctcaataacgttatcgttttctacaataactacatattctacctttttattttctaactcggtaaaaaaattagaatcccatagggctaaatgtctagcgatatttcttttcgtttcctctgtacacatagtgttacaaaaccctgaaaagaagtgagtatacttgtcatcatttctaatgtttcctccagtccactgtataaacgcataatccttgtaatgatctggatcatccttgactaccacaacatttcttttttctggcataacttcgttgtcctttacatcatcgaacttctgatcattaatatgctcatgaacattaggaaatgtttctgatggaggtctatcaataactggcacaacaataacaggagttttcaccgccgccatttagttattgaaattaatcatatacaactctttaatacgagttatattttcgtctatccattgtttcacatttacatatttcgacaaaaagatataaaatgcgtattccaatgcttctctgtttaatgaattactaaaatatacaaacacgtcactgtctggcaataaatgatatcttagaatattgtaacaatttattttgtattgcacatgttcgtgatctatgagttcttcttcgaatggcataggatctccgaatctgaaaacgtataaataggagttagaataataatatttgagagtattggtaatatataaactctttagcggtataattagtttttttctctcaatttctatttttagatgtgatggaaaaatgactaattttgtagcattagtatcatgaactctaatcaaaatcttaatatcttcgtcacacgttagctctttgaagtttttaagagatgcatcagttggttctacagatggagtaggtgcaacaattttttgttctacacatgtatgtactggagccattgttttaactataatggtgcttgtatcgaaaaactttaatgcagatagcggaagctcttcgccgcgactttctacatcgtaattgggttctaacgccgatctctgaatggatactagttttctaagttctaatgtgattctctgaaaatgtaaatccaattcctccggcattatagatgtgtatacatcggtaaataaaactatagtatccaacgatcccttctcgcaaattctagtcttaaccaaaaaatcgtatataaccacggagatggcgtatttaagagtggattcttctaccgttttgttcttggatgtcatataggaaactataaagtccgcactactgttaagaatgattactaacgcaactatatagttcaaattaagcattttggaaacataaaataactctgtagacgatacttgactttcgaataagtttgcagacaaacgaagaaagaacagacctctcttaatttcagaagaaaactttttttcgtattcctgacgtctagagtttatatcaataagaaagttaagaattagtcggttaatgttgtatttcattacccaagtttgagatttcataatattatcaaaagacatgataatattaaagataaagcgctgactatgaacgaaatagctatatggttcgctcaaaaatatagtcttgttaaacgtggaaacgataactgtatttttaatcacgtcagcggcatctaaattaaatataggtatatttattccacacactctacaatatgccacaccatcttcataataaataaattcgttagcaaaattattaattttagtgaaatagttagcgtcaactttcatagcttccttcaatctaatttgatgctcacacggtgcgaattctactctaacatcccttttccatgcctcaggttcatcgatctctataatatctagttttttgcgtttcacaaacacaggctcgtctctcgcgatgagatctgtatagtaactatgtaaatgataactagatagaaagatgtagctatatagatgacgatcctttaagagaggtataataactttaccccaatcagatagactgttgttatggtcttcggaaaaagaatttttataaatttttccagtattttccaaatatacgtacttaacatctaaaaaatccttaatgataataggaatggataatccgtctattttataaagaaatacatatcgcacattatacttttttttggaaatgggaataccgatgtgtctacataaatatgcaaagtctaaatattttttagagaatcttagttggtccaaattcttttccaagtacggtaatagatttttcatattgaacggtatcttcttaatctctggttctagttccgcattaaatgatgaaactaagtcactatttttataactaacgattacatcacctctaacatcatcatttaccagaatactgatcttcttttgtcgtaaatacatgtctaatgtgttaaaaaaaagatcatacaagttatacgtcatttcatctgtggtattcttgtcattgaaggataaactcgtactaatctcttctttaacagcctgttcaaatttatatcctatatacgaaaaaatagcaaccagtgtttgatcatccgcgtcaatattctgttctatcgtagtgtataacaatcgtatatcttcttctgtgatagtcgatacgttataaaggttgataacgaaaatatttttatttcgtgaaataaagtcatcgtaggattttggacttatattcgcgtctagtagatatgcttttatttttggaatgatctcaattagaatagtctctttagagtccatttaaagttacaaacaactaggaaattggtttatgatgtataatttttttagtttttatagattctttattctatacttaaaaaatgaaaataaatacaaaggttcttgagggttgtgttaaattgaaagcgagaaataatcataaattatttcattatcgcgatatccgttaagtttgtatcgtaatggcgtggtcaattacaaataaagcggatactagtagcttcacaaagatggctgaaatcagagctcatctaaaaaatagcgctgaaaataaagataaaaacgaggatattttcccggaagatgtaataattccatctactaagcccaaaaccaaacgagccactactcctcgtaaaccagcggctactaaaagatcaaccaaaaaggaggaagtggaagaagaagtagttatagaggaatatcatcaaacaactgaaaaaaattctccatctcctggagtcggcgacattgtagaaagcgtggctgctgtagagctcgatgatagcgacggggatgatgaacctatggtacaagttgaagctggtaaagtaaatcatagtgctagaagcgatctttctgacctaaaggtggctaccgacaatatcgttaaagatcttaagaaaattattactagaatctctgcagtatcgacggttctagaggatgttcaagcagctggtatctctagacaatttacttctatgactaaagctattacaacactatctgatctagtcaccgagggaaaatctaaagttgttcgtaaaaaagttaaaacttgtaagaagtaaatgcgtgcacttttttataaagatggtaaactctttaccgataataattttttaaatcctgtatcagacgataatccagcgtatgaggttttgcaacatgttaaaattcctactcatttaacagatgtagtagtatatgaacaaacgtgggaagaggcattaactagattaatttttgtgggaagcgattcaaaaggacgtagacaatacttttacggaaaaatgcatgtacagaatcgcaacgctaaaagagatcgtatttttgttagagtatataacgttatgaaacgaattaattgttttataaacaaaaatataaagaaatcgtccacagattccaattatcagttggcggtttttatgttaatggaaactatgttttttattagatttggtaaaatgaaatatcttaaggagaatgaaacagtagggttattaacactaaaaaataaacacatagaaataagtcccgatgaaatagttatcaagtttgtaggaaaggacaaagtttcacatgaatttgttgttcataagtctaatagactatataaaccgctattgaaactgacggatgattctagtcccgaagaatttctgttcaacaaactaagtgaacgaaaggtatacgaatgtatcaaacagtttggtattagaatcaaggatctccgaacgtatggagtcaattatacgtttttatataatttttggacaaatgtaaagtccatatctcctcttccgtcaccaaaaaagttaatagcgttaactatcaaacaaactgctgaagtggtaggtcatactccatcaatttcaaaaagagcttacatggcaacgactattttagaaatggtaaaggataaaaattttttagatgtagtatctaaaactacgttcgatgaattcctatctatagtcgtagatcacgttaaatcatctacggatggatgatatagatctttacacaaataattacaagaccgataaatggaaatggataagcgtataaaatctctcgcaatgacagctttcttcggagagctaaacacattagatattatggcattgataatgtctatatttaaacgccatccaaacaataccattttttcagtggataaggatggtcagtttatgattgatttcgaatacgataattataaggcttctcaatatttggatctgaccctcactccgatatctggagatgaatgcaagactcacgcatcgagtatagccgaacaattggcgtgtgcggatattattaaagaggatattagcgaatatatcaaaactactccccgtcttaaacgatttataaaaaaataccgcaatagatcagatactcgcatcagtcgagatacagaaaagcttaaaatagctctagctaaaggcatagattacgaatatataaaagacgcttgttaataagtaaatgaaaaaaaactagtcgtttataataaaacacgatatggatgccaacgtagtatcatcttctactattgcaacgtatatagacgctttagcgaagaatgcttcagaattagaacagaggtctaccgcatacgaaataaataatgaattggaactagtatttattaagccgccattaattactttgacaaatgtagtgaatatctctacgattcaggaatcgtttattcgatttaccgttactaataaggaaggtgttaaaattagaactaagattccattatctaaggtacatggtctagatgtaaaaaatgtacagttagtagatgctatagataacatagtttgggaaaagaaatcattagtgacggaaaatcgtcttcacaaagaatgcttgttgagactatcgacagaggaacgtcatatatttttggattacaagaaatatggatcctctatccgactagaattagtcaatcttattcaagcaaaaacaaaaaactttacgatagactttaagctaaaatattttctaggatccggtgcccagtctaaaagttctttattacacgctattaatcatccaaagtcaaggcctaatacatctctggaaatagaattcacacctagagacaatgaaaaagttccatatgatgaactaataaaggaattgacgactctatcacgtcatatatttatggcttctccagagaatgtaattctttctccgcctattaacgcacctataaagacttttatgttgcctaaacaagatatagtaggtctggatctggaaaatctatacgctgtaactaagactgacggcattcctataactatcagagttacatcaaacgggttgtattgttattttacacatcttggttatattattagatatcctgttaagagaataatagattccgaagtagtagtctttggtgaggcagttaaggataagaactggaccgtatatctcattaagctaatagagcctgtgaatgcaatcaatgatagactagaagaaagtaagtatgttgaatctaaactagtggatatttgtgatcggatagtattcaagtcaaagaaatacgaaggtccgtttactacaactagtgaagtcgtcgatatgttatctacatatttaccaaagcaaccagaaggtgttattctgttctattcaaagggacctaaatctaacattgattttaaaattaaaaaggaaaatactatagaccaaactgcaaatgtagtatttaggtacatgtccagtgaaccaattatctttggagaatcgtctatctttgtagagtataagaaatttagcaacgataaaggctttcctaaagaatatggttctggtaagattgtgttatataacggcgttaattatctaaataatatctattgtttggaatatattaatacacataatgaagtgggtattaagtccgtggttgtacctattaagtttatagcagaattcttagttaatggagaaatacttaaacctagaatcgataaaaccatgaaatatattaactcagaagattattatggaaatcaacataatatcatagtcgaacatttaagagatcaaagcatcaaaataggagatatctttaacgaggataaactatcggatgtgggacatcaatacgccaataatgataaatttagattaaatccagaagttagttattttacgaataaacgaactagaggaccgttgggaattttatcaaactacgtcaagactcttcttatttctatgtattgttccaaaacatttttagacgattccaacaaacgaaaggtattggcgattgattttggaaacggtgctgacctggaaaaatacttttatggagagattgcgttattggtagcgacggatccggatgctgatgctatagctagaggaaatgaaagatacaacaaattaaactctggaattaaaaccaagtactacaaatttgactacattcaggaaactattcgatccgatacatttgtctctagtgtcagagaagtattctattttggaaagtttaatatcatcgactggcagtttgctatccattattcttttcatccgagacattatgctaccgtcatgaataacttatccgaactaactgcttctggaggcaaggtattaatcactaccatggacggagacaaattatcaaaattaacagataaaaagacttttataattcataagaatttacctagtagcgaaaactatatgtctgtagaaaaaatagctgatgatagaatagtggtatataatccatcaacaatgtctactccaatgactgaatacattatcaaaaagaacgatatagtcagagtgtttaacgaatacggatttgttcttgtagataacgttgatttcgctacaattatagaacgaagtaaaaagtttattaatggcgcatctacaatggaagatagaccgtctacaaaaaactttttcgaactaaatagaggagccattaaatgtgaaggtttagatgtcgaagacttacttagttactatgttgtttatgtcttttctaagcggtaaataataatatggtatgggttctgatatccccgttctaaatgcattaaataattccaatagagcgatttttgttcctataggaccttccaactgtggatactctgtattgttaatagatatattaatacttttgtcgggtaacagaggttctacgtcttctaaaaataaaagtttgataacatctggcctgttcataaataaaaacttggcgattctatatatactcttattatcaaatctagccattgtcttatagatgtgagctactgtaggtgtaccatttgattttctttctaatactatatatttctctcgaagaagttcttgcacatcatctgggaataaaatactactgttgagtaaatcagttattttttttatatcgatattgatggacatttttatagttaaggataataagtatcccaaagtcgataacgacgataacgaagtatttatacttttaggaaatcacaatgactttatcagattaaaattaacaaaattaaaggagcatgtatttttttctgaatatattgtgactccagatacatatggatctttatgcgtcgaattaaatgggtctagttttcagcacggtggtagatatatagaggtggaggaatttatagatgctggaagacaagttagatggtgttctacatccaatcatatatctgaagatatacccgaagatatacacactgataaatttgtcatttatgatatatacacttttgacgctttcaagaataaacgattggtattcgtacaggtacctccgtcgttaggagatgatagtcatttgactaatccgttattgtctccgtattatcgtaattcagtagccagacaaatggtcaatgatatgatttttaatcaagattcatttttaaaatatttattagaacatctgattagaagccactatagagtttctaaacatataacaatagttagatacaaggataccgaagaattaaatctaacgagaatatgttataatagagataagtttaaggcgtttgtattcgcttggtttaacggcgtttcggaaaatgaaaaggtactagatacgtataaaaaggtatctaatttgatataatgaattcagtgactgtatcacacgcgccatatactattacttatcacgatgattgggaaccagttatgagtcaattggtagagttttataacgaagtagccagttggctgctacgagacgagacgtcgcctattcctgataagttctttatacagttgaaacaaccgcttagaaataaacgagtatgtgtgtgtggtatagatccgtatccgaaagatggaactggtgtaccgttcgaatcaccaaattttacaaaaaaatcaattaaggagatagcttcatctatatctagattaaccggagtaattgattataaaggttataaccttaatataatagacggggttataccctggaattattacttaagttgtaaattaggagaaacaaaaagtcacgcgatctactgggataagatttccaagttactgctgcagcatataactaaacacgttagtgttctttattgtttgggtaaaacagatttctcgaatatacgggcaaagttagaatccccggtaactaccatagtgggatatcatccagcggctagagaccgccaattcgagaaagatagatcatttgaaattatcaacgttttactggaattagacaacaaggtacctataaattgggctcaagggtttatttattaatgctttagtgaaattttaacttgtgttctaaatggatgcggctattagaggtaatgatgttatctttgtccttaagactataggtgtcccatcagcatgtagacaaaatgaagatccaagattcgtagaagcatttaaatgcgacgagttaaaaagatatattgataataatccagaatgtacactattcgaaagtcttagggatgaggaagcatactctatagtcagaattttcatggatgtagatttagacgcgtgtctagacgaaatagattatttaacggctattcaagattttattatcgaggtgtcaaactgtgtagctagattcgcgtttacagaatgcggtgccattcatgaaaatgtaataaaatccatgagatctaatttttcattgactaagtctacaaatagagataaaacaagttttcatattatctttttagacacgtataccactatggatacattgatagctatgaaacgaacactattagaattaagtagatcatctgaaaatccactaacaagatcgatagacactgccgtatataggagaaaaacaactcttcgggttgtaggtactaggaaaaatccaaattgcgacactattcatgtaatgcaaccaccgcatgataatatagaagattacctattcacttacgtggatatgaacaacaatagttattacttttctctacaacgacgattggaggatttagttcctgataagttatgggaaccagggtttatttcattcgaagacgctataaaaagagtttcaaaaatattcattaattctataataaactttaatgatctcgatgaaaataattttacaacggtaccactggtcatagattacgtaacaccttgtgcattatgtaaaaaacgatcgcataaacatccgcatcaactatcgttggaaaatggtgctattagaatttacaaaactggtaatccacatagttgtaaagttaaaattgttccgttggatggtaataaactgtttaatattgcacaaagaattttagacactaactctgttttattaaccgaacgaggagactatatagtttggattaataattcatggaaatttaacagcgaagaacccttgataacaaaactaattctgtcaataagacatcaactacctaaggaatattcaagcgaattactctgtccgaggaaacgaaagactgtagaagctaacatacgagacatgttagtagattcagtagagaccgatacctatccggataaacttccgtttaaaaatggtgtattggacctggtagacggaatgttttactctggagatgatgctaaaaaatatacgtgtactgtatcaaccggatttaaatttgacgatacaaagttcgtcgaagacagtccagaaatggaagagttaatgaatatcattaacgatatccaaccattaacggatgaaaataagaaaaatagagagctatatgaaaaaacattatctagttgtttatgtggtgctaccaaaggatgtttaacattcttttttggagaaactgcaactggaaagtcgacaaccaaacgtttgttaaagtctgctatcggtgacctgtttgttgagacgggtcaaacaattttaacagatgtattggataaaggacctaatccatttatcgctaacatgcatttgaaaagatctgtattctgtagcgaactacctgattttgcctgtagtggatcaaagaaaattagatctgataatattaaaaagttgacagaaccttgtgtcattggaagaccgtgtttctccaataaaattaataatagaaaccatgctacaatcattatcgatactaattacaaacctgtctttgataggatagataacgcattaatgagaagaattgccgtcgtgcgattcagaacacacttttctcaaccttctggtagagaggctgctgaaaataatgacgcgtacgataaagtcaaactattagacgaggggttagatggtaaaatacaaaataatagatatagatttgcatttctatacttgttggtgaaatggtacaaaaaatatcatgttcctattatgaaactatatcctacacccgaagagattcctgactttgcattctatctcaaaataggtactctgttagtatctagctctgtaaagcatattccattaatgacggacctctccaaaaagggatatatattgtacgataatgtggttactcttccgttgactactttccaacagaaaatatccaagtattttaattctagactatttggacacgatatagagagcttcatcaatagacataagaaatttgccaatgttagtgatgaatatctgcaatatatattcatagaggatatttcatctccgtaaatatatgctcatatatttatagaagatatcacatatctaaatgaataccggaattatagatttatttgataatcatgttgatagtataccaactatattacctcatcagttagctactctagattatctagttagaactatcatagatgagaacagaagcgtgttattgttccatattatgggatcaggtaaaacaataatcgctttgttgttcgccttggtagcttccagatttaaaaaggtttacattctagtgccgaacatcaacatcttaaaaattttcaattataatatgggtgtagctatgaacttgtttaatgacgaattcatagctgagaatatctttattcattccacaacaagtttttattctcttaattataacgataacgtcattaattataacggattatctcgctacaataactctatttttatcgttgatgaggcacataatatctttgggaataatactggagaacttatgaccgtgataaaaaataaaaacaagattccttttctactattgtctggatctcccattactaacacacctaatactctgggtcatattatagatttaatgtccgaagagacgatagattttggtgaaattattagtcgtggtaagaaagtaattcagacacttcttaacgaacgaggtgtgaatgtacttaaggatttgcttaaaggaagaatatcatattacgaaatgcctgataaagatctaccaacgataagatatcacggacgtaagtttctagatactagagtagtatattgtcacatgtctaaacttcaagagagagattatatgattactagacgacagctatgttatcatgaaatgtttgataaaaatatgtataacgtgtcaatggcagtattgggacaacttaatctgatgaataatttagatactttatttcaggaacaggataaggaattgtacccaaatctgaaaataaataatggcgtgttatacggagaagaattggtaacgttaaacattagttccaaatttaagtactttatcaatcggatacagacactcaacggaaaacattttatatacttttctaattctacatatggtggattggtaattaaatatatcatgctcagtaatggatattctgaatataatggttctcagggaactaatccacatatgataaacggcaaaccaaaaacatttgctatcgttactagtaaaatgaaatcgtctttagaggatctattagatgtgtataattctcctgaaaacgatgatggtagtcaattgatgtttttgttttcatcaaacattatgtccgaatcctatactctgaaagaggtaaggcatatttggtttatgactatcccagatactttttctcaatacaaccaaattcttggacgatctattagaaaattctcttacgccgatatttctgaaccagttaatgtatatcttttagccgccgtatattccgatttcaatgacgaagtaacgtcattaaacgattacacacaggatgaattaattaatgttttaccatttgacatcaaaaagctgttgtatctaaaatttaagacgaaagaaacgaatagaatatactctattcttcaagagatgtctgaaacgtattctcttccaccacatccatcaattgtaaaagttttattgggagaattggtcagacaatttttttataataattctcgtattaagtataacgactccaagttacttaaaatggttacatcagttataaaaaataaagaagacgctaggaattacatagatgatattgtaaacggtcacttctttgtatcgaataaagtatttgataaatctcttttatacaaatacgaaaacgatattattacagtaccgtttagactttcctacgaaccatttgtttggggagttaactttcgtaaagaatataacgtggtatcttctccataaaactgatgagatatataaagaaataaatgtcgagctttgttaccaatggatacctttccgttacattggaacctcatgagctgacgttagacataaaaactaatattaggaatgccgtatataagacgtatctccatagagaaattagtggtaaaatggccaagaaaatagaaattcgtgaagacgtggaattacctctcggcgaaatagttaataattctgtagttataaacgttccgtgtgtaataacctacgcgtattatcacgttggggatatagtcagaggaacattaaacatcgaagatgaatcaaatgtaactattcaatgtggagatttaatctgtaaactaagtagagattcgggtactgtatcatttagcgattcaaagtactgcttttttcgaaatggtaatgcgtatgacaatggcagcgaagtcactgccgttctaatggaggctcaacaaggtatcgaatctagttttgtttttctcgcgaatatcgtcgactcataagaaagagaatagcggtaagtataaacacgaatactatggcaataattgcgaatgttttattcccttcgatatatttttgataatatgaaaaacatgtctctctcaaatcggacaaccatctcataaaatagttctcgcgcgctggagaggtagttgctgctcgtataatctccccagaataatatacttgcgtgtcgtcgttcaatttatacggatttctatagttctctgttatataatacggttttccatcatgattagacgacgacaatagtgttctaaatttagatagttgatcagaatgaatgtttattggcgttggaaaaattatccatacagcgtctgcagagtgcttgatagttgttcctagatatgtaaaataatccaacgtactaggtagcaaattgtctagataaaatactgaatcaaacggcgcagacgtattagcggatctaatggaatccaattgattgactatcttttgaaaatatacatttttatgatccgatacttgtaagaatatagaaataatgataagtccatcatcgtgtttttttgcctcttcataagaactatattttttcttattccaatgaacaagattaatctctccagagtatttgtacacatctatcaagtgattggatccataatcgtcttcctttccccaatatatatgtagtgatgataacacatattcattggggagaaaccctccacttatatatcctcctttaaaattaatccttactagttttccagtgttctggatagtggttggtttcgactcattataatgtatgtctaacggcttcaatcgcgcgttagaaattgcttttttagtttctatattaataggagatagttgttgcggcatagtaaaaatgaaatgataactgtttaaaaatagctcttagtatgggaattacaatggatgaggaagtgatatttgaaactcctagagaattaatatctattaaacgaataaaagatattccaagatcaaaagacacgcatgtgtttgctgcgtgtataacaagtgacggatatccgttaataggagctagaagaacttcattcgcgttccaggcgatattatctcaacaaaattcagattctatctttagagtatccactaaactattacggtttatgtactacaatgaactaagagaaatctttagacggttgagaaaaggttctatcaacaatatcgatcctcacttcgaagagttaatattattgggtggtaaactagataaaaaggaatctattaaagattgtttaagaagagaattaaaagaggaaagtgatgaacgtataacagtaaaagaatttggaaatgtaattctaaaacttacaacacgggataaattatttaataaagtatatataagttattgcatggcgtgttttattaatcaatcgttggaggatttatcgcatactagtatttacaatgtagaaattagaaagattaaatcattaaatgattgtattaacgacgataaatacgaatatctgtcttatatttataatatgctagttaatagtaaatgaacttttacagatctagtataattagtcagattattaagtataatagacgactagctaagtctattatttgcgaggatgactctcaaattattacactcacggcattcgttaaccaatgcctatggtgtcataaacgagtatccgtgtccgctattttattaactactgataacaaaatattagtatgtaacagacgagatagttttctctattctgaaataattagaactagaaacatgtttagaaagaaacgattatttctgaattattccaattatttgtccaaacaggaaagaagtatactatcgtcatttttttctctatatccagctactgctgataatgatagaatagatgctatttatccgggtggcatacccaaaaggggtgagaatgttccagagtgtttatccagggaaattaaagaagaagttaatatagacaattcttttgtattcatagacactcggttttttattcatggcatcatagaagataccattattaataaattttttgaggtaatcttctttgtcggaagaatatctctaacgagtgatcaaatcattgatacatttaaaagtaatcatgaaatcaaggatctaatatttttagatccgaattcaggtaatggactccaatacgaaattgcaaaatatgctctagatactgcaaaactcaaatgttatggccatagaggatgttattacgaatcattaaaaaaattaactgaggatgattgattagaaaatataaattaatttaccatcgtgtatttttataacgggattgtccggcatatcatgtagatagttaccgtctacatcgtatactcgaccatctacgcctttaaatcctctatttattgacattaatctattagaattggaataccaaatattagtaccctcaattagtttattggtaatattttttttagacgatagatcgatggctcttgaaaccaaggttttccaaccggactcattgtcgatcggtgagaagtctttttcattagcatgaatccattctaatgatgtatgtttaaacactctaaacaattggacaaattcttttgatttgctttgaatgatttcaaataggtcttcgtctacagtaggcataccattagataatctagccattataaagtgcacgtttacatatctacgttctggaggagtaagaacgtgactattgagacgaatggctcttcctactatctgacgaagagacgcctcgttccaagtcatatctagaatgaagatatcattgattgagaagaagctaataccctcgcctccactagaagagaatacgcatgttttaatgcattctccgttagtgtttgattcttggttaaactcagccaccgccttgattctagtatcttttgttctagatgagaactctatattagagataccaaagactttgaaatatagtaataagatttctattcctgactgattaacaaatggttcaaagactagacatttaccatgggatgctaatattcccaaacatacatctataaatttgacgcttttctcttttaattcagtaaatagagagatatcagccgcactagcatcccctttcaatagttctccctttttaaaggtatctaatgcggatttagaaaactctctatttcttaatgaatttttaaaatcattatatagtgttgctatctcttgcgcgtattcgcccggatcacgattttgtctttcaggaaagctatcgaacgtaaacgtagtagccatacgtctcagaattctaaatgatgatatacctgtttttatttcagcgagtttagccttttgataaatttcttcttgctttttcgacatattaacgtatcgcattaatactgttttcttagcgaatgatgcagacccttctacgtcatcaaaaatagaaaactcgttattaactatgtacgaacataggcctcctagtttggagactaattctttctcatcaactagacgtttattctcaaatagcgattggtgttgtaaggatcctggtcgtagtaagttaaccaacatggtgaattcttgcacactattgacgataggtgtagccgataaacaaatcatcttatggttttttaacgcaatggttttagataaaaaattatatactgaacgagtaggacggatcttaccatcttctttgattaatgatttagaaatgaagttatgacattcatcaataatgacgcatattctactcttggaattaatagttttgatattagtaaaaaatttatttctaaaattttgatcatcgtaattaataaaaatacaatccttcgttatctctggagcgtatctgagtatagtgttcatccaaggatcttctatcaaagcctttttcaccaataagataatagcccaattcgtataaatatccttaagatgtttgagaatatatacagtagtcattgttttaccgacacccgtttcatggaacaataaaagagaatgcatactgtctaatcctaagaaaactcttgctacaaaatgttgataatccttgaggcgtactacgtccgaccccatcatttcaacaggcatattagtagttctgcgcaatgcataatcgatataggccgcgtgtgatttactcatttatgagtgataagtaataactatgttttaaaaatcacagcagtagtttaactagtcttctctgatgtttgttttcgatacttttcgaatcagaagtcatactagaataaagcagcgagtgaacgtaatagagagcttcgtatactctattcgaaaactctaagaacttattaatgaattccgtatccactggatcgtttaaaatactaaattgaacactgttcacatccttccaagaagaagacttagtgacggacttaacatgagacataaataaatccaaattttttttacaaacatcactagccaccataatggcgctatctttcaaccagctatcgcttacgcattttagcagtctaacatttttaaagagactacaatatattctcatagtatcgattacacctctaccgaataaagttggaagtttaataatacaatatttttcgtttacaaaatcaaataatggtcgaaacacgtcgaaggttaacatcttataatcgctaatgtatagattgttttcagtgagatgattattagatttaatagcatctcgttcacgtttgaacagtttattgcgtgcgctgaggtcggcaactacggcgtccgctttagtactcctcccataatactttacgctattaatctttaaaatttcatagactttatctagatcgctttctggtaacatgatatcatgtgtaaaaagttttaacatgtcggtcggcattctatttagatcattaactctagaaatctgaagaaagtaattagctccgtattccagactaggtaatgggcttttacctagagacagattaagttctggcaatgtttcataaaatggaagaaggacatgcgttccctcccggatattttttacaatttcatccatttacaactctatagtttgttttcattattattagttattatctcccataatcttggtaatacttaccccttgatcgtaagataccttatacaggtcattacatacaactaccaattgtttttgtacataatagattggatggttgacatccatggtggaataaactactcgaacagatagtttatctttccccctagatacattggccgtaatagttgtcggcctaaagaatatctttggtgtaaagttaaaagttagggttcttgttccattattgctttttgtcagtagttcattataaattctcgagatgggtccgttctctgaatatagaacatcatttccaaatctaacttctagtctagaaataatatcggtcttattcttaaaatctattcccttgatgaagggatcgttaatgaacaaatccttggcctttgattcggctgatctattatctccgttatagacgttacgttgactagtccaaagacttacaggaatagatgtatcgatgatgttgatactatgtgatatgtgagcaaagattgttctcttagtggcatcactatatgttccagtaatggcggaaaactttttagaaatgttatatataaaagaattttttcgtgttccaaacattagcagattagtatgaagataaacactcatattatcaggaacattatcaatttttacatacacatcagcatcttgaatagaaacgataccatcttctggaacctctacgatctcggcagactccggataaccagtcggtgggccatcactaacaataactagatcatccaacaatctactcacatatgcatctatataatctttttcatcttgtgagtaccctggatacgaaataaatttattatccgtatttccataataaggtttagtataaacagagagcgatgttgccgcatgaacttcagttacagtcgccgttggttggtttatttgacctattactctcctaggtttctctataaacgatggtttaatttgtacattcttaaccatatatccaataaagctcaattcaggaacataaacaaattctttgttgaacgtttcaaagtcgaacgaagagtcacgaataacgatatcggatactggattgaaggttaccgttacggtaatttttgaatcggatagtttaagactgctgaatgtatcttccacatcaaacggagttttaatataaacgtatactgtagatggttctttaatagtgtcattaggagttaggccaatagaaatatcattaagttcactagaatatccagagtgtttcaaagcaattgtattattgatacaattattatataattcttcgccctcaatttcccaaataacaccgttacacgaagagatagatacgtgattaatacatttatatccaacatatggtacgtaaccgaatcttcccatacctttaacttctggaagttccaaactcagaaccaaatgattaagcgcagtaatatactgatccctaatttcgaagctagcgatagcctgattgtctggaccatcgtttgtcataactccggatagagaaatatattgcggcatatataaagttggaatttgactatcgactgcgaagacattagaccgtttaatagagtcatccccaccgatcaaagaattaatgatagtattattcattttctatttaaaatggaaaaagcttacaataaactccgtagagaaatatctataatttgtgagttttccttaaagtaacagcttccgtaaacgccgtctttatctcttagtaagtttattgtatttataaccttttccttatcttcatagaatactaaaggcaacaaagaaatttttggttcttctctaagagctacgtgagacttaaccatagaagccaacgaatccctacatattttagaacagaaataccctacttcaccacccttgtatgtctcaatactaataggtctaaaaaccaaatcttgattacaaaaccaacacttatcaattacactatttgtcttaatagacacatctgccatagatttataatactttggtagtatacaagcgagtgcttcttctttagcgggcttaaagactgctttaggtgctgaaataaccacatctggaaggcttactcgcttagccatttaattacggaactatttttttatacttctaatgagcaagtagaaaacctctcatctacaaaaacgtactcgtgtccataatcctctaccatagtaacacgttttttagatctcatatgtgctaaaaagttttcccatactaattggttactattatttttcgtataatttttaacagtttgaggttttagatttttagttacagaagtgatatcgaatattttatccaaaaagaatgagtaattaattgtcttagaaggagtgttttcttggcaaaagaataccaagtgcttaaatatttctactacttcattaatcttttctgtactcagattcagtttctcatcttttacttgattgattatttcaaagactaacttataatcctttttatttattctctcgttagccttaagaaaactagatacaaaatttgcatctacatcatccgtggatatttgatttttttccatgatatccaagagttccgagataatttctccagaacattgatgagacaataatctccgcaatacatttctcaaatgaataagtttattagacacgtggaagtttgactttttttgtacctttgtacatttttgaaataccgactcgcaaaaaatacaatattcatatccttgttcagatactataccgttgtgtctacaaccgctacataatcgtagattcatgttaacactctacgtatctcgtcgtccaatattttatataaaaacattttatttctagacgttgccagaaaatcctgtaatatttttagttttttgggctgtgaataaagtatcgccctaatatggttaccgtcctccgccaatatagtagttaaattatccgcacatgcagaagaacaccgcttaggcggattcagtacaatgttatatttttcgtaccaactcatttaaatatcataatctaaaatagttctgtaatatgtctagcgctaatatattgatcataatcctgtgcataaattaagatacaacaatgtctcgaaatcatcgacatggcttcttccatagttagaagatcgtcgtcaaagttagcaacgtgattcatcaacatttgctgttttgaggcagcaaatactgaaccatcgccattcaaccattcataaaaaccatcgtctgaatccattgataatttcttgtactggtttttgagagctcgcatcaatctagcatttctagctcccggattgaaaacagaaagaggatcgtacatccagggtccattttctgtaaatagaatcgtataatgtcccttcaagaagatatcagacgatccacaatcaaagaattggtctccgagtttgtaacaaactgcggactttaacctatacatgataccgtttagcataatttctggtgatacgtcaatcggagtatcatctattagagatctaaagccggtgtaacattctccaccaaacatattcttattctgacgtcgttctacataaaacatcattgctccattaacgataacaggggaatgaacagcactacccatcacattagttcccaatggatcaatgtgtgtaactccagaacatcttccatatcctatgttaggaggagcgaacaccactcttccactattgccatcgaatgccatagaataaatatccttggaattgatagaaatcggactgtcggatgttgtgatcatcttcataggattaacaacgatgtatggtgccgcctgaagtttcatatcgtaactgatgccgtttataggtctagccacagaaaccaacgtaggtctaaatccaactatagacaaaatagaagccaatatctgttcctcatctgtcataacttgagagcatccagtatgaataatcttcattagatggggatctaccgcatcatcatcgttacaataaaaaattcccattctaatgttcataattgcttttctaatcatggtatgcatgtttgctctctgaatctctgtggaaattagatctgatacacctgtaatcactatcggattatcctccgtaagacgattaaccaacaacatataattataagactttacttttctaaattcataaagttgctggattaggctataggtgtctccatgtacatacgcgttctcgagcgcaggaagtttaataccgaatagtgccatcagaataggatgaatatagtaattagtttctggttttctataaataaaagacaaatcttgtgaactagacatatcggtaaaatgcatggattggaatcgtgtagtcgacagaagaatatgatgattagatggagagtatattttatctaactctttgagttggtcaccgattctaggactagctcgagaatgaataagtactaaaggatgagtacatttcacagaaacactagcattgttcaatgtgctctttacatgggtaaggagttgaaatagctcgtttctatttgttctgacaatatttagtttattcataatgttaagcatatcctgaatagtaaagttagatgtgtcatacttgttagtagttagatatttagcaattgcattcccatcatttctcaatctcgtactccaatcatgtgtagatgctacttcatctatagaaaccatacaatcctttttgataggctgttgagattgattatttcctgcacgtttaggtttggtacgttgatttctagcccctgcggatataaagtcatcgtctacaatttgggacaatgaattgcatacactacaagacaaagatttatcagaagtgtgaatatgatcttcatctaccaaagaaagagtttgattagtataactagattttagtcctgcgttagatgttaaaaaaacatcgctattgaccacggcttccattatttatattcgtagtttttactcgaaagcgtgattttaatatccaatcttattacttttggaatcgttcaaaacctttgactagttgtagaatttgatctattgccctacgcgtatactcccttgcatcatatacgttcgtcaccagatcgtttgtttcggcctgaagttggtgcatatctttttcaacactcgacatgagatccttaagggccatatcgtctagattttgttgagatgctgctcctggatttggattttgttgtgctgttgtacatactgtaccaccagtaggtgtaggagtacatacagtggccacaataggaggttgaggaggtgtaaccgttggagtagtacaagaaatatttccatccgattgttgtgtacatgtagttgttggtaacgtctgagaaggttgggtagatggcggcgtcgtcgttttttgatctttattaaatttagagataatatcctgaacagcattgctcggcgtcaacgctggaaggagtgaactcgccggcgcatcagtatcttcagacagccaatcaaaaagattagacatatcagatgatgtattagtttgttgtcgtggttttggtgtaggagcagtactactaggtagaagaataggagccggtgtagctgttggaaccggctgtggagttatatgaatagttggttgtagcggttggataggctgtctgctggcggccatcatattatctctagctagttgttctcgcaactgtctttgataatacgactcttgagactttagtcctatttcaatcgcttcatcctttttcgtatccggatccttttcttcagaataatagattgacgactttggtgtagaggattctgccagcccctgtgagaacttgttaaagaagtccatttaaggctttaaaattgaattgcgattataagattaaatggcagacacagacgatattatcgactatgaatccgatgatctcactgaatacgaggatgatgaagaagaggaagaagatggagagtcactagaaactagtgatatagatcccaaatcttcttataagattgtagaatcagcatccactcatatagaagatgcgcattccaatcttaaacatatagggaatcatatatctgctcttaaacgacgctatactagacgtataagtctatttgaaatagcgggtataatagcagaaagctataacttgcttcaacgaggaagattacctctagtttcagaattttctgacgaaacgatgaagcaaaatatgctacatgtaattatacaagagatagaggagggttcttgtcctatagtcatcgaaaagaacggagaattgttgtcggtaaacgattttgacaaagatggtctaaaattccatctagactatattatcaaaatttggaaacttcaaaaacgatattagaatttatacgaatatcgttctctaaatgtcacaatcaagtctcgcatgttcagcaatttattgtcgtactttatatcgtgttcattaacgatatcttgcaaaatagtaatgattctatcttccttcgatagatattcttcagagattattgtcttatattctttcttgttatcagatatgaatttgataagactttgaacattattgatacccgtctgtttaattttttctacagatattttagttttggcagattctatcgtatctgtcaatagacatccaacatcgacattcgacgtcaattgtctataaatcaacgtataaattttagaaataacattagcgaattgttgtgcattgatgtcgttattctgaaacagtatgattttaggtagcattttcttaacaaagagaacgtatttattgttactcagttgaacagatgatatatccagattactaacgcatctgattccgtataccaaactttcagaagaaatggtatacaattgtttgtattcattcaatgtctctttttcagaaattagtttagagtcgaatactgcaataattttcaagagatagttttcatcagataagattttatttagtgtagatatgataaaactattgttttgttggagaacttgatacgccgcgttctctgtagtcgacgctctcaaatgggaaacaatctccattatttttttggaatcggatacaatatcttcggtatcttgacgcagtctagtatacatagagttaagagagattagagtttgtacattaagcaacatgtctctaaatgtggctacaaacttttccttttccacatcatctagtttattatataccgatttcacaacggcaccagatttaaggaaccagaatgaaaaactctgataactacaatatttcatcatagttacgattttatcatcttctatagttggtgtgatagcgcatacctttttctccaagactggaaccaacgtcataaaaatgtttaaatcaaaatccatatcaacatctgatgcgctaagaccagtctcgcgttcaagattatctttactaatggtgacgaactcatcgtataaaactctaagtttgtccattatttatttacagatttagttgtttaatttatttgtgctcttccagagttgggatagtatttttctaacgtcggtattatattattaggatctacgttcatatgtatcataatattaatcatccacgttttgataaatctatctttagcttctgaaataacgtatttaaacaaaggagaaaaatatttagctacggcatcagacgcaataacattttttgtaaatgtaacatatttagacgacagatcttcgttaaaaagttttccatctatgtagaatccatcagttgttaacaccattcccgcgtcagattgaataggagtttgaatagtttgttttggaaatagatccttcaataacttatagttgggtgggaaaaaatcgattttatcactagactctttcttttttactatcattacctcatgaactatttcttgaatgagtatatgtattttctttcctatatcggacgcgttcattggaaaatataccatgtcgttaactataagaatatttttatcctcgtttacaaactgaataatatcagatgtagttcgtaaacgaactatatcatcaccagcacaacatctaactatatgatatccactagtttcctttagtcgtttattatcttgttccatattagcagtcattccatcatttaagaaggcgtcaaagataatagggagaaatgacattttggattctgttacaactttaccaaaattaaggatatacggacttactatctttttctcaacgtcaatttgatgaacacacgatgaaaatgtacttcgatgagattgatcatgtagaaaacaacaagggatacaatatttccgcatatcatgaaatatattaagaaatcccaccttattatatttccccaaaggatccatgcacgtaaacattatgccgttatcattaataaagacttctttctcatcggatctgtaaaagttgttactgatttttttcattccaggatctagataattaataatgatgggttttctattcttattctttgtattttggcatatcctagaccagtaaacagtttccactttggtaaaatcagcagacttttgaacgctattaaacatggcattaatggcaataactaaaaatgtaaaatatttttctatgttaggaatatggtttttcactttaatagatatatggtttttggccaaaatgatagatatttttttatccgaggatagtaaaatattattagtcgccgtctctataaaaatgaagctagtctcgatatccaattttattctagaattgataggagtcgccaaatgtaccttatacgttatatctcccttgatgcgttccatttgtgtatctatatcggacacaagatctgtaaatagttttacgttattaatcatcacggtatcgccgtcgctagataatgctaatgtaccatccaagtcccaaatggagagatttaactgttcatcgtttagaataaaatgattaccggtcatattaataaagtgttcatcgtatctagataacaacgacttataattaatgtccaagtcttgaactcgctgaatgatcttttttaacccagttagttttagattggtacgaaatatattgttaaactttgattctacagtaatgtccaaatctagttgtggaaatacttccatcaacattgtttcaaacttgataatattattatctacatcttcgtacgatccaaattccggaatagatgtatcgcacgctctgaccacccagataaccaaaaagtcacacgctccaggatatacattgtataaaaagctatcgttttttagtagtgtttttttctgagtatatacgaagggattaaaaatagtattatcaacgtaactatattccaaattattcttatgagaatagataataatatcgtccttaatatctaacaaatttcctaaatatccctttaattgagtcattcgaagcgtcaatagaatatgtctcttaactatttccggctgttgtatatttaaatgacttcgtaaaaaataatatatgggcgacttctcatctatgtaatcatatggagtgagatatagggctcgttctacctcctgccccttacccacctgtaataccaattgcggacttactatatatcgcatatttatatcgtggggtaaagtgaaaatctactaccgatgatgtaagtcttacaatgttcgaaccagtaccagatcttaatttggaggcctccgtagaactaggggaggtaaatatagatcaaacaacacctatgataaaggagaatagcggttttatatcccgcagtagacgtctattcgcccatagatctaaggatgatgagagaaaactagcactacgattctttttacaaagactttattttttagatcatagagagattcattatttgttcagatgcgttgacgctgtaaaagacgtcactattaccaaaaaaaataacattatcgtggcgccttatatagcacttttaactatcgcatcaaaaggatgcaaacttacagaaacaatgattgaagcattctttccagaactatataatgaacatagtaagaaatttaaattcaactctcaagtatccatcatccaagaaaaactcggataccagtttggaaactatcacgtttatgattttgaaccgtattactctacagtagctctggctattcgagatgaacattcatctggcatttttaatatccgtcaagagagttatctggtaagttcattatctgaaataacatatagattttatctaattaatctaaaatctgatcttgttcaatggagtgctagtacgggcgctgtaattaatcaaatggtaaatactgtattgattacagtgtatgaaaagttacaactggtcatagaaaatgattcacaatttacatgttcattggctgtggaatcagaacttccaataaaattacttaaagatagaaatgaattatttacaaaattcattaacgagttaaaaaagaccagttcattcaagataagcaaacgcgataaggatacgctattaaaatattttacttaggactggagttagaatttatagacgactcatttcgtttatcattattactaccatcattattagtattcttcttgtcatcttgttcagaaatatacagcaatgctatacctaatactaaatacattatcatgctcgcaatggctctaacaacaacgaaccaaaatgaatttggtcgtagcttttgttcacaaaaatacataaagaaatgtctacataaatctatggcgccattggctacttgaaatagcgccagtcctcctacagattttaatatagctgtataacatgacatttattcatcatcaaaagagacagagtcaccatctgtcatatttagattttttttcatgtgttcaaagtatcctctactcatttcattataatagtttatcatacttagaattttaggacggatcaatgagtaagacttgactagatcgtcagtagtaatttgtgcatcgtctattctgcatccgcttcgtcgaataatgtatagcatcgctttgagattctccatagctatcaagtctttatacaatgacatggaaatatctgtgaatactttatacttctccaacatcgatgccttaacatcatcgcctactttagcattgaaaatacgttctattgtgtagatggatgtagcaagatttttaaacaacaatgccattttacacgatgattgcctcaagtctccaatcgtttgtttagaacgattagctacagagttcaacgcttggctgactagcatattattatctttagaaattgtattcttcaatgaggcgtttatcatatctgtgatttcgttagtcatattacagtctgactgggttgtaatgttatccaacatatcacctatggatacggtacacgtaccagcatttgtaataatcctatctaagatgttgtatggcattgcgcagaaaatatcttctcctgtaatatctccactctcgataaatctactcagattattcttaaatgccttattctctggagaaaagatatcagtgtccatcatttcattaatagtatacgcagaaaagataccacgagtatcaattctatccaagatacttatcggttccgagtcacagataatggtttcctctccttcgggagatcctgcatagaaatatctaggacaatagtttctatactgtctgtaactctgataatctctaaagtcactaactgataccatgaaattgagaagatcaaacgctgaagtaattaatttttctgcctcgtttttactacaactagttttcatcaatgtagtgacgatgtattgtttagttactcttggtctaatactgatgatagagatattattacttcccataatggatcttctagtagtcaccttaaagcccattgatgcaaatagcagatagataaagtcttggtatgactcctttctaatatagtacggactacctttgtcacccaactttatacccacataagccataacaacctctttaatagccgtttcatgaggtttatcagccatgagcctgagtagttggaagaatctcatgaatcccgtctcagaaagtcctatatgcatgatagatttatctttcctgggaaactctcgtatagtcatagatgaaatactcttcaaagtttctgaaataagattagtaacagtcttacctccgactactctaggtaacaaacaaactctaataggtgttttctctgcggagataatatcagaaaggatagagcaataagtagtattattgtgattataaagaccgaatacataacaggtagaatttataaacatcatgtcctgaaggtttttagacttgtattcctcgtaatccataccgtcccaaaacatggatttggtaactttgatagccgtagatctttgttccttcgccaacaggttaaagaaattaataaagaatttgttgtttctatttatgtccacaaattgcacgtttggaagcgccacggttacattcactgcagcattttgaggatcgcgagtatgaagtacgatgttattgtttactggtatatctggaaagaaatctaccagtctaggaataagagattgatatcgcatagaaatacaaaagttcataatctcatcatcgaagagcattttgttaccattgtaataaatatccactctgtcatatgtataaatgaagtactgttcaaacatgatgagatgtttatatgttggcatagtagtgagatcgacgtttggtaatggcaatgtattaagattaactccataatgtctagcagcatctgcgatgttataagtgttgtcaaagcggggtcgatcttgtgctgttatatattgtctaacacctataagattatcaaaatcttgtctgcttaatacaccgttaacaatttttgccttgaattcttttattggtgcattaataacatccttatagaggatgttaaacaaataagtattatcaaagttaagatctgggtatttcttttctgctagaacatccattgagtcggagccatctggtttaatataaccaccgataaatctagctctgtattctgtatccgtcaatctaatattaagaaggtgttgagtgaaaggtggaagatcgtaaaagctgtgagtattaatgataggattagtttccgaactaatgttaattggggtattaataatatctatatttccagcgttaagtgtaacattaaacagttttaattcacgtgacgtggtatcaattaaataattaatgcccaatttggatatagcagcctgaagctcatcttgtttagttacggatcctaatgagttattaagcaatatatcgaacggatgaacgaaggttgttttgagtttgtcgcatactttgtaatctagacatagatgcggaagaacggtagaaactatacgaaataaatattcagagtcctctaattgatcaagagtaactattgacttaataggcatcatttatttagtattaaatgacgaccgtaccagtgacggatatacaaaacgatttaattacagagttttcagaagataattatccatctaacaaaaattatgaaataactcttcgtcaaatgtctattctaactcacgttaacaacgtggtagatagagaacataatgccgccgtagtgtcatctccagaggaaatatcctcacaacttaatgaagatctatttccagatgatgattctccggccactattatcgaaagagtacaacctcatactactattattgacgatactccacctcctacgtttcgtagagagttattgatatcggaacaacgtcaacaacgagaaaaaagatttaatattacagtatcgaaaaatgctgaagcaataatggaatctagatctatgatatcttctatgccaacacaaacaccatccttgggagtagtttatgataaagataaaagaattcagatgttggaggatgaagtggttaatcttagaaatcaacgatctaatacaaaatcatctgataatttagataattttaccagaatactatttggtaagactccgtataaatcaacagaagttaataagcgtatagccatcgttaattatgcaaatttgaacgggtctcccttatcagtcgaggacttggatgtttgttcagaggatgaaatagatagaatctataaaacgattaaacaatatcacgaaagtagaaaacgaaaaattatcgtcactaacgtgattattattgtcataaacattatcgagcaagcattgctaaaactcggatttgaagaaatcaaaggactgagtaccgatatcacttcagaaattatcgatgtggagatcggagatgactgcgatgctgtagcatctaaactaggaatcggtaacagtccggttcttaatattgtattgtttatactcaagatattcgttaaacgaattaaaattatttaatttaatacattcccatatccagacaacaatcgtctggattaatctgttcctgtcgtctcataccggacgacatattaatctttttattagtaggcatctttttagatggtttctttttcccagcattaactgagtcgatacctagaagatcgtgattgatctctccgaccattccacgaacttctaattggccgtctctgacggtaccataaactattttaccagcattagtaacagcttggacaatctgaccatccatcgcattgtacgatgtagtagtaactgttgttctacgtctaggagcaccagaagtatttttggagcccttggaggttgatgtagaagaagacgaggattttgattttggtttacatgtaatacattttgaactctttgattttgtatcacatgcgccggcagtcacatctgtttgagaattaagattattgttgcctcctttgacggctgcatctccaccgatttgcgctagtagatttttaagctgtggtgtaatcttattaactgtttcgatataatcatcgtaactgcttctaacggctaaattttttttatccgccatttagaagctaaaaatatttttatttatacagaagatttaactagattatacaatgaactaatatgatccttttccagattatttacaaacttggtattttttggttctggaggaggcgaatttaaattcggacttggattcggattttgtgagttcttgatcttattatacatcgagtataggatggcgacggtaactgctacgcaaataccgatcaacaaaagaataccaatcatttattgacaataacttcactattgatcaagtatgcaatatatcatcttttcactaaataagtagtaataatgattcaacaatgtcgagatatatggacgataataatttagttcatggaaatatcgctatgattggtatgaatgactccgctaactctgtggggtgcgcagtgctttccccacatagaataaattagcattccgactgtgataataataccaagtataaacgccataatactcaatactttccatgtacgagtgggactggtagacttactaaagtcaataaaggcgaagatacacgaaagaatcaaaagaatgattccagcgattagcacgccggaaaaataatttccaatcataagcatcatgtccatttaactaataaaaattttaaatcgccgaatgaacaaagtggaatataaaccatataaaaacaatagtttgtactgcaaaaataatatctatttttgttttcgaagatatggtaaaattaaatagtagtacacagcatgttataactaacagcagcaacggctcgtaattacttatcatttactagacgaaaaggtggtgggatattttcttgctcaaataatacgaatatatcacccatccattttatgcgatgtttatatactctaatctttaatagatctatagacgacgggtttaccaacaatatagattttatcgattcatctaatttaaacccttccttaaacgtgaatgatctattatctggcataacgatgactctacctgatgaatcggacaatgtactgggccatgtagaataaattatcaacgaattatcgtctacgaacatttatatcatttgttttaattttaggacgcgaataaatagatataaaatagaaaataacagatattacaaccaatgttatggccgcgcccaaccaggtaggcagttttattttatcttttactacaggttctcctggatgatgtacgtcaccaacggcggacgtagttctagtacaattagacgtaagttctgcttgggaattttttaacgctaaagagttaacgttaatcgtgcacccaacgtatttacatctagttctttgaacatcttgattataatataaccattttctatctctagattcgtcggtgcactcatgtaaccaacataccctaggtcctaaatatttatctccggaattagattttggataattcgcgcaccaacaatttctatttcctttatgatcgttacaaaagacgtataatgccgtatccccaaaagtaaaataatcaggacgaataattctaataaactcagaacaatatctcgcatccatatgtttggagcaaatatcggaataagtagacatagccggtttccgttttgcacgtaaccattctaaacaattggggtttccaggatcgtttctacaaaatccagtcatgaaatcgtcacaatgttctgtcttgtaattattattaaatatttttggacagtgtttggtatttgtcttagaacaacattttgctacgctatcactatcgcccaggagataatccttttttataaaatgacatcgttgcccggatgctatataatcagtagcgtgttttaaatccttaatatattcaggagttacctcgttctgataatagattaatgatccaggacgaaatttgaaagaactacatggttctccatgaattaatacatattgtttagcaaattcaggaactataaaactactacaatgatctatcgacataccatctatcaaacaaaatttgggtttaatttctcccggagatgtttcataatagtacgtataactttcttctgcaaacttaacagctctattatattcaggataattaaaacctaattccatatatttgtctcgtatatctgctattcctggtgctattttgattctattaagagtaacagctgcccccattcttaataatcgtcagtatttaaactgttaaatgttggtatatcaacatctaccttatttcccgcagtataaggtttgttgcaggtatactgttcaggaatggttacatttatacttcttctatagtcctgtctttcgatgttcatcacatatgcaaagaacagaataaacaaaataatgtaagaaataatattaaatatctgtgaattcgtaaatacattgattgccataataattacagcagctacaatacacacaatagacattcccacagtgttgccattacctccacgatacatttgagttactaagcaataggtaataactaagctagtaagaggcaatagaaaagatgagataaatatcatcaatatagagattagaggagggctatatagagccaagacgaacaaaatcaaaccgagtaacgttctaacatcattatttttgaagattcccaaataatcattcattcctccataatcgttttgcatcatacctccatctttaggcataaacgattgctgctgttcctctgtaaataaatctttatcaagcactccagcacccgcagagaagtcgtcaagcatattgtaatatcttaaataactcatttatatattaaaaaatgtcactattaaagatggagtataatctttatgccgaactaaaaaaaatgacttgtggtcaacccctaagtctttttaacgaagacggggatttcgtagaagttgaaccgggatcatcctttaagtttctgatacctaagggattttacgcctctccttccgtaaagacgagtctagtattcgagacattaacaacgaccgataataaaatcactagtatcaatccaacaaatgcgccaaagttatatcctcttcaacgcaaagtcgtatctgaagtagtttctaatatgaggaaaatgatcgaatcaaaacgtcctctatacattactcttcacttggcgtgtggatttggtaagactattaccacgtgttatcttatggctacacacggtagaaaaaccgtcatttgcgtacccaataaaatgttaatacatcaatggaagacacaggtagaggcagtcggattggaacataagatatccatagatggagtaagtagtctattaaaggaactaaagactcaaagtccggatgtattaatagtagtcagtagacatctgacaaacgatgccttttgtaaatatatcaataagcattatgatttgttcatcttggatgaatcacatacgtataatctgatgaacaatacagcagttacaagatttttagcgtattatcctccgatgatgtgttattttttaactgctacacctagaccagctaaccgaatttattgtaacagtattattaatattgccaagttatccgatctaaaaaaaactatctatgcggtagatagtttttttgagccatattccacagataatattagacatatgataaaacgattagatggaccatctaataaatatcatatatatactgagaagttattatctgtagacgagcctagaaatcaacttattcttgataccctggtagaagaattcaagtcaggaactattaatcgaattttagttattactaaactacgtgaacatatggtattcttctacaaacgattattagatcttttcggaccagaggttgtatttataggagacgcccaaaatagacgtactccagatatggtcaaatcaatcaaggaactaaatagatttatattcgtatccaccttattttattccggtactggtttagatattcctagtttggattcgttgttcatttgctcggcagtaatcaacaatatgcaaatagagcaattactagggagggtatgtcgagaaacagaactattagataggacggtatatgtatttcctagcacatccatcaaagaaataaagtacatgataggaaatttcatgcaacgaattattagtctgtctgtagataaactaggatttaaacaaaaaagttatcggaaacatcaagaatccgatcccacttctgtatgtacaacatcctccagagaagaacgtgtattaaatagaatatttaactcgcaaaatcgttaagaagtttaagcgacgatccgcatgctgcgcaggccagtgtattacccctcatagtattaatataatccaatgatacttttgtgatgtcggaaatcttaaccaatttagactgacaggcagaacacgtcatgcaatcatcatcgtcatcgataactgtagtcttgggcttctttttgcggctcttcattccggaacgcacattggtgctatccatttaggtagtaaaaaataagtcagaatatgccctatagcacgatcgtgcaaaacctggtatatcgtctctatctttatcacaatatagtgtatcgacatctttattattattgacttcgtttatcttggaacatggaatgggaacatttttgttatcaacggccacctttgccttaattccagatgttgtaaaattataactaaacagtctatcatcgacacaaatgaaattcttgtttagacgtttgtagtttacgtatgcggctcgttcgcgtctcattttttcagatattgcaggtactataatattaaaaataagaatgaaataacataggattaaaaataaagttatcatgacttctagcgctgatttaactaacttaaaagaattacttagtctgtacaaaagtttgagattttcagattctgcggctatagaaaagtataattctttggtagaatggggaacatctacttactggaaaataggcgtgcaaaaggtagctaatgtcgagacgtcaatatctgattattatgatgaggtaaaaaataaaccgtttaatattgatccgggctattacattttcttaccggtatattttgggagcgtctttatttattcgaagggtaaaaatatggtagaacttggatctggaaactcttttcaaataccagatgatatgcgaagtgcgtgtaacaaagtattagacagcgataacggaatagactttctgagatttgttttgttaaacaatagatggataatggaagatgctatatcaaaatatcagtctccagttaatatatttaaactagctagtgagtacggattaaacatacccaaatatttagaaattgaaatagaggaagacacattatttgacgacgagttatactctattatagaacgctcttttgatgataaatttccaaaaatatccatatcgtatattaagttgggagaacttagacggcaagttgtagactttttcaaattctcgttcatgtatattgagtccatcaaggtagatcgtataggagataatatttttattcctagcgttataacaaaatcaggaaaaaagatattagtaaaagatgtagaccatttaatacgatccaaggttagagaacatacatttgtaaaagtaaaaaagaaaaacacattttccattttatacgactatgatggaaacggaacagaaactagaggagaagtaataaaacgaattatagacactataggacgagactattatgttaacggaaagtatttctctaaggttggtagtgcaggcttaaagcaattgactaataaattagatattaatgagtgcgcaactgtcgatgagttagttgatgagattaataaatccggaactgtaaaacgaaaaataaaaaaccaatcagcatttgatttaagcagagaatgtttgggatatccagaagcggattttataacgttagttaataacatgcggttcaaaatagaaaattgtaaggttgtaaatttcaatattgaaaatactaattgtttaaataacccgagtattgaaactatatatagaaactttaaccagttcgtctcaatctttaatgtcgtcaccgatgtcaaaaaaagattattcgagtgaaataatatgcgcctttgatataggtgcaaaaaatcctgccagaactgttttagaagtcaaggataactccgttagggtattggatatatcaaaattagactggagttctgattgggaaaggcgcatagctaaagatttgtcacaatatgaatacactacagttcttctagaacgtcagcctagaaggtcgccgtatgttaaatttatctattttattaaaggctttttatatcatacatcggctgccaaagttatttgcgtctcgcctgtcatgtctggtaattcatatagagatcgaaaaaagagatcggtcgaagcatttcttgattggatggacacattcggattgcgagactccgttccggatagacgcaaattagacgatgtagcggatagtttcaatttggctatgagatacgtattagataaatggaatactaattatacaccttataataggtgtaaatctaggaattacataaaaaaaatgtaataacgttagtaacgccattatggataatctatttacctttctacatgaaatagaagatagatatgccagaactatttttaactttcatctaataagttgcgatgaaataggagatatatatggtcttatgaaagaacgaatttcctcagaggatatgtttgataatatagtgtataataaagatatacatcatgccattaagaaactagtgtattgcgacatccaacttactaaacacattattaatcagaatacgtatccggtatttaacgattcttcacaagtgaaatgttgtcattatttcgatataaactcagataatagcaatattagctctcgtacagtagagatatttgagagggaaaagtcatctcttgtatcatatattaaaactaccaataagaagagaaaggtcaattacggcgaaataaagaaaactgttcatggaggcactaatgcaaattacttttccggtaaaaagtctgatgagtatctgagtactacagttagatccaacattaatcaaccttggatcaaaaccatttctaagagaatgagagtagatatcattaatcactctatagtaacgcgtggaaaaagctctatattacaaactatagaaattatttttactaatagaacatgtgtgaaaatattcaaggattctactatgcacattattctatccaaggacaaggatgaaaaggggtgtatacacatgattgacaaattattctatgtctattataatttatttctgttgttcgaagatatcatccaaaacgagtactttaaagaagtagctaatgttgtaaaccacgtacttacggctacggcattagatgagaaattattcctaattaagaaaatggctgaacacgatgtttatggagttagcaatttcaaaatagggatgtttaacctgacatttattaagtcgttggatcataccgttttcccctctctgttagatgaggatagcaaaataaagttttttaaggggaaaaagctcaatattgtagcattacgatctctggaggattgtataaattacgtgactaaatccgagaatatgatagaaatgatgaaggaaagatcgactattttaaatagcatagatatagaaacggaatcggtagatcgtctaaaagaattgcttctaaaatgaaaaaaaacactgattcagaaatggatcaacgactcggatataagtttttggtgcctgatcctaaagccggagttttttatagaccgttacatttccaatatgtatcgtattctaattttatattgcatcgattgcatgaaatcttgaccgtcaagcggccactcttatcgtttaagaataatacagaacgaattatgatagaaattagcaatgttaaagtgactcctccagattactcacctataatcgcgagtattaaaggtaagagttatgacgcattagccacgttcactgtaaatatctttaaagaggtaatgaccaaagagggtatatccatcactaaaataagtagttatgagggaaaagattctcatttgataaaaattccgctactaataggatacgggaataaaaatccacttgatacagccaagtatcttgttcctaatgtcataggtggagtctttatcaataaacaatctgtcgaaaaagtaggaattaatctagtagaaaagattacaacatggccaaaatttagggttgttaagccaaactcattcactttctcgttttcctccgtatcccctcctaatgtattaccgacaagatatcgccattacaagatatctctggatatatcacaattggaagcgttgaatatatcatcgacaaagacatttataacggtcaatattgttttgctgtctcaatatttatctagagtgagtctagaattcattagacgtagcttatcatacgatatgcctccagaagttgtctatctagtaaacgcgataatagatagtgctaaacgaattactgaatctattactgactttaatattgatacatacattaatgacctggtggaagctgaacacattaaacaaaaatctcagttaacgatcaacgagttcaaatatgaaatgctgcataactttttacctcatatgaactatacacccgatcaactaaagggattttatatgatatctttactaagaaagtttctctactgtatctaccacacttctagatatccagatagagattcgatggtttgtcatcgtatactaacatacggcaaatattttgagacgttggcacatgatgaattagagaattacataggcaacatccgaaacgatatcatgaacaatcacaagaacagaggcacttacgcggtaaacattcatgtactaacaactcctggacttaatcatgcattttctagcttattgagtggaaagttcaaaaagtcagacggtagttatcgaacacatcctcactattcatggatgcagaatatttctattcctaggagtgttggattttatccggatcaagtaaagatttcaaagatgttttctgtcagaaaataccatccaagtcaatatctttacttttgttcatcagacgttccggaaagaggtcctcaggtaggtttagtatctcaattgtctgtcttgagttccattacaaatatactaacgtctgagtatttggatttggaaaagaaaatttgtgagtatatcagatcatattataaagatgatataagttactttgaaacaggatttccaatcactatagaaaatgctctagtcgcatctcttaatccaaatatgatatgtgattttgtaactgactttagacgtagaaaacggatgggattcttcggtaacttggaggtaggtattactttagttagggatcacatgaatgaaattcgcattaatattggagcgggaagattagtcagaccattcttggttgtggataacggagagctcatgatggatgtgtgtccggagttagaaagcagattagacgatatgacattctctgacattcagaaagagtttccacatgtcatcgaaatggtagatatagaacaatttacttttagtaacgtatgtgaatcggttcaaaaatttagaatgatgtcaaaggatgaaagaaagcaatacgatttatgtgactttcctgccgaatttagagatggatatgtggcatcttcattagtgggaatcaatcacaattctggacccagagctattcttggatgtgctcaagctaaacaagctatctcttgtctgagttcggatatacgaaataaaatagacaatggaattcatttgatgtatccagagaggccaatcgtgattagtaaggctttagaaacttcaaagattgcggctaattgcttcggccaacatgttactatagcattaatgtcgtacaaaggtatcaatcaagaggatggaattatcatcaaaaaacaatttattcagagaggcggtctcgatatagttaccgcaaagaaacatcaagtagaaattccgttggaaaactttaataacaaagaaagagataggtctaatgcatattcgaaattagaaagtaatggattagttagactgaatgctttcttggaatccggagacgctatggcacgaaatatctcatcaagaactcttgaagatgattttgctagagataatcagattagcttcgatgtttccgagaaatataccgatatgtacaaatctcgcgttgaacgagtacaagtagaacttactgacaaagttaaggtacgagtattaaccatgaaagaaagaagacccattctaggagacaaatttaccactagaacgagtcaaaagggaacagtcgcgtatgtcgcggatgaaacggaacttccatacgatgaaaatggtatcacaccagatgtcattattaattctacatccatcttctctagaaaaactatatctatgttgatagaggttattttaacagccgcatattctgctaagccgtacaacaataagggagaaaaccgacctgtctgttttcctagtagtaacgaaacatccatcgatacatatatgcaattcgctaaacaatgttatgagcattcaaatccgaaattgtctgatgaagaattatcggataaaatcttttgtgaaaagattctctatgatcctgaaacggataagccttatgcatccaaagtattttttggaccaatttattacttgcgtctgaggcatttaactcaggacaaggcaaccgttagatgtagaggtaaaaagacgaagctcattagacaagcgaatgagggacgaaaacgtggaggaggtattaagtttggagaaatggagagagactgtttaatagcgcatggcgcagccaatactattacagaagttttgaaagattcggaagaagattatcaagatgtgtatgtttgtgaaaattgtggagacatagcagcacaaatcaagggtattaatacatgtcttagatgttcaaaacttaatctctctcctctcttaacaaaaattgataccacgcacgtatctaaagtatttcttactcaaatgaacgccagaggcgtaaaagtcaaattagatttcgaacgaaggcctccttcgttttataaaccattagataaagttgatctcaagccgtcttttctggtgtaatattctagtttggtagtagatacatatcaatatcatcaaattcgagatccgaattataaaatgggcgtggattgttaactatagaatcggacgtctgatattcgaaaatctgtggagtttcaggttttggtggaggtgtaactgctacttgggatactgaagtctgatattcagaaagctgggggatgttctggttcgacatccaccgatggtgtcacatcactaatcggttcggtaacgtctgtggatggaggtgctacttctacagaacctgtagcctcagttgtcaacggagatacatttttaatgcgaggaaatgtataatttggtaatggtttctcatgtggatctgaagaagaggtaagatatctactagaaagataccgatcacgttctagttctcttttgtagaacttaactttttctttctcagcatctagttgatattccaacctcttcacgttactacgttcagatttcaattcacgttcgcatgggttacctccgcagtttttacgagcgatttcacgttcagccttcatgcgtctctgtgatccgtttacgttaaaccataaatacatgggtgatcctataaacatgaatttatttctaattctcagagctatagttaattgaccgtgtaatatttgcttacatgcatacttgatacgctcattaataagatttttatcattgctcgttatctcagaatcgtatatataaggagtaccatcgtgattcttaccagatattatacaaaatactatatataaaatatattgaccaacgttagtaatcatataaatgtttaacgttttaaattttgtattcaatgatccattatcatacgctagcatggtcttatgatattcattctttaaaatataatattgtgttagccattgcattggagctcctaatggagattttctattctcgtccattttaggatatgctttcataaagtccctaataacttcgtgaataatgtttctatgttttctactgatgcatgtatttgcttcgatttttttatcccatgtttcatctatcatagatttaaacgcagtaatgctcgcaacattaacatcttgaaccgttggtacaattccgttccataaatttataatgttcgccatttatataactcattttttgaatatacttttaattaacaaaagagttaagttactcatatggacgccgtccagtctgaacatcaatctttttagccagagatatcatagccgctcttagagtttcagcgtgattttccaacctaaatagaacttcatcgttgcgtttacaacacttttctatttgttcaaactttgttgttacattagtaatctttttttccaaattagttagccgttgtttgagagtttcctcattgtcgtcttcatcggctttaacaattgcttcgcgtttagcctctggctttttatcagcctttgtagaaaaaaattcagttgctggaattgcaagatcgtcatctccggggaaaagagttccgtccatttaaagtacagattttagaaactgacactctgcgttatttatatttggtacaacacatggattataaatattgatgttaataacatcagaaaatgtaaagtctatacattgttgcatcgtgttaaattttctaatggatctagtattattgggtccaacttctgcctgaaatccaaatatggaagcggatacaaaaccgtttcctggataaaccacacatctccacttttgctttacatcagaaattgtgtcgttgacatcttgaactctcctatctaatgccggtgttccacctatagattttgaatattcgaatgctgcatgagtagcattaaattccttaatattgccataattttcatatattgagtaaccctggataaaaagtaaacacaccgcagccgtcgctaccacaataaaaaaaattgatagagagttcatttataatctattagaagctgacaaaatttttttacacgcatcagacaatgctttaataaatagttcaacatctacttttgtcatatcgaaccgatggtatgattctaacctagaattacatccgaaaaagttgactatgttcatagtcattaagtcattaacaaacaacattccagactctggattataagacgatactgtttcgtcacaatcacctaccttaatcatgtgattatgaatattggctattagagcaccttctaagaaatctataatatctttgaaacacgatttaaaatcaaaccacgaatatacttctacgaagaaagttagtttacccataggagagataactataaatggagatctaaatacaaaatccggatctatgatagttttaacattattatattctctattaaatacctccacatctaaaaatgttaattttgaaactatgtcttcgtttattaccgtacctgaactaaacgctataagctctattgtttgagaactctttaaacgatattcttgaaatacatgtaacaaagtttcctttaactcggtcggtttatctaccatagttacagaatttgtatccttatctataatataataatcaaaatcgtataaagttatataattatcgcgttcagattgggatcttttcaaatagactaaaaaccccatttctctagtaagtatcttatgtatatgtttgtaaaatatcttcatggtgggaatatgctctaccgcagttagccattcctcattgacagcggtagatgtattagacaaaactattccaatgtttaacaagggccattttacgagattattaaatccttgtttgataaatgtagccaatgagggttcgagttcaacgacgattgaattctcttcccgcggatgctgcatgatgaacgacgggatgttgttcgattgatttggaattctttttcgactttttgtttatattaaatattttaaaatttatagctgatagcaattcatgtaccacggataatgtagacgcgtattgcgcatcgatatctttattattagataaatttatcaataaatgtgagaagtttgcctcgttaaggtcttccatttaaatattatataaacatttgtgtttgtatcttattcgtcttttatggaatagttttttactagtaaagctgcaattacacactttgtccgtaaaacataaatataaacaccagcttttatcaatcgttccaaaaagtcgacggcggacatttttaacatggcatctattttaaatacacttaggtttttggaaaaaacatcattttataattgtaacgattcaataactaaagaaaagattaagattaaacataagggaatgtcatttgtattttataagccaaagcattctaccgttgttaaatacttgtctggaggaggtatatatcatgatgatttggttgtattggggaaggtaacaattaatgatctaaagatgatgctattttacatggatttatcatatcatggagtgacaagtagtggagtaatttacaaattgggatcgtctatcgatagactttctctaaataggactattgttacaaaagttaataattatgatgatacattttttgacgacgatgattgatcgctattgcacaattttgtttttttactttctaatatagcgtttagattctttttcatgtgcgaatattgatttactaaaatatcgatgtttaacttttgttctatgacgtccttatcggcggtatcggtacatatacgtaattcaccttcacaaaatacggagtcttcgataataatagccaatcgattattggatctagctgtctgtatcatattcaacatgtttaatatatcctttcgtttcccctttacaggcatcgatcgtagcatattttccgcgtctgagatggaaatgttaaaactacaaaaatgcgtaatgttagcccgtcctaatattggtacgtgtctataagtttggcatagtagaataatagacgtgtttaaatgccttccaaagtttaagaattctattagagtattgcattttgatagtttatcgcctacatcatcaaaaataagtaaaaagtgtgctgattttttatgattttgtgcgacagcaatacatttttctatgttacttttagttcgtatcagattatattctagagattcctgactactaacgaaattaatatgatttggccaaatgtatccatcataatctgggttataaacgggtgtaaacaagaatatatgtttatattttttaactagtgtagaaaacagagatagtaaatagatagtttttccagatccagatcctcccgttaaaaccattctaaacggcatttttaataaattttctcttgaaaattgtttttcttggaaacaattcataattatatttacagttactaaattaatttgataataaatcaaaatatggaaaactaaggtcgttagtagggaggagaacaaagaaggcatatcgtgatataaataacatttattatcatgatgacaccagaaaacgacgaagagcagacatctgtgttctccgctactgtttacggagacaaaattcaaggaaagaataaacgcaaacgcgtgattggtctatgtattagaatatctatggttatttcactactatctatgattaccatgtccgcgtttctcatagtgcgcctaaatcaatgcatgtctgctaacgaggctgctattactgacgccgctgttgccgttgctgctgcatcatctactcatagaaaggttgcgtctagcactacgcaatatgatcacaaagaaagctgtaatggtttatattaccagggttcttgttatatattacattcagactaccagttattctcggatgctaaagcaaattgcactgcggaatcatcaacactacccaataaatccgatgtcttgattacctggctcattgattatgttgaggatacatggggatctgatggtaatccaattacaaaaactacatccgattatcaagattctgatgtatcacaagaagttagaaagtatttttgtgttaaaacaatgaactaatatttatttttgtacattaataaatgaaatcgcttaatagacaaactgtaagtatgtttaagaagttgtcggtgccggccgctataatgatgatactctcaaccattattagtggcataggaacatttctgcattacaaagaagaactgatgcctagtgcttgcgccaatggatggatacaatacgataaacattgttatctagataccaacattaaaatgtccacagataatgcggtttatcagtgtcgtaaattacgagctagattgcctagacctgatactagacatctgagagtattgtttagtattttttataaagattattgggtaagtttaaaaaagaccaataataaatggttagatattaataatgataaagatatagatattagtaaattaacaaattttaaacaactaaacagtacgacggatgctgaagcgtgttatatatacaagtctggaaaactggttaaaacagtatgtaaaagtactcaatctgtactatgtgttaaaaaattctacaagtgacaacaaaaaatgaattaataataagtcgttaacgtacgccgccatggacgccgcgtttgttattactccaatgggtgtgttgactataacagatacattgtatgatgatctcgatatttcaatcatggactttataggaccatacattataggtaacataaaaactgtccaaatagatgtacgggatataaaatattccgacatgcaaaaatgctactttagctataagggtaaaatagttcctcaggattctaatgatttggctagattcaacatttatagcatttgtgccgcatacagatcaaaaaataccatcatcatagcatgcgactatgatatcatgttagatatagaagataaacatcagccattttatctattcccatctattgatgtttttaacgctacaatcatagaagcgtataacctgtatacagctggagattatcatctaatcatcaatccttcagataatctgaaaatgaaattgtcgtttaattcttcattctgcatatcagacggcaatggatggattataattgatgggaaatgcaatagtaattttttatcataaaagttgtaaagtaaataataaaacaataaatattgaactagtagtacgtatattgagcaatcagaaatgatgctggtacctcttatcacggtgacagtagttgcgggaacaatattagtatgttatatattatatatttgtaggaaaaagatacgtactgtctataatgacaataaaattatcatgacaaaattaaaaaagataaagagttctaattccagcaaatctagtaaatcaactgatagcgaatcagactgggaggatcactgtagtgctatggaacaaaacaatgacgtagataatatttctaggaatgagatattggacgatgatagcttcgctggtagtttaatatgggataacgaatccaatgttatggcgcctagcacagaacacatttacgatagtgttgctggaagcacgctgctaataaataatgatcgtaatgaacagactatttatcagaacactacagtagtaattaatgaaacggagactgttgaagtacttaatgaagataccaaacagaatcctaactattcatccaatcctttcgtaaattataataaaaccagtatttgtagcaagtcaaatccgtttattacagaacttaacaataaatttagtgagaataatccgtttagacgagcacatagcgatgattatcttaataagcaagaacaagatcatgaacacgatgatatagaatcatcggtcgtatcattggtgtgattagtttcctttttataaaattgaagtaatatttagtattattgctgccgtcacgttgtacaaatggagatattccctgtattcggcatttctaaaattagcaattttattgctaataatgactgtagatattatatagatacagaacatcaaaaaattatatctgatgagatcaatagacagatggatgaaacggtacttcttaccaacatcttaagcgtagaagttgtaaatgacaatgagatgtaccatcttattccccatagactatcgactattatactctgtattagttctgtcggaggatgtgttatctctatagataatgacgtcaatggcaaaaatattctaacctttcccattgatcatgctgtaatcatatccccactgagtaaatgtgtcgtagttagcaagggtcctacaaccatattggttgttaaagcggatatacctagcaaacgattggtaacatcgtttacaaacgacatactgtatgtaaacaatctatcactgattaattatttgccgttgtctgtattcattattagacgagttaccgactatttggatagacacatatgcgatcagatatttgcgaataataagtggtattccattataaccatcgacaataagcagtttcctattccatcaaactgtataggtatgtcctctgccaagtacataaattctagcatcgagcaagatactttaatacatgtttgtaacctcgagcatccattcgacttagtatacaaaaaaatgcagtcgtacaattctgtacctatcaaggaacaaatattgtacggtagaattgataatataaatatgagcattagtatttctgtgtattaatagatttctagtatggggatcattaatcatctctaatctctaaatacctcataaaacgaaaaaaaagctattatcaaatactgtacggaatggattcattctcttctctttttatgaaactctgttgtatatctactgataaaactggaagcaaaaaatctgatagaaagaataagaataagatcaagatcaaggattatatggaacacgattattataaaataacaatagttcctggttcctcttccacgtctactagctcgtggtattatacacatgcctagtaatagtctctttgcgttgacggaaagcagactagaaataacaggctaaaatgttcagacaccataatagttcccaacccagataataacagagtaccatcaacacattcctttaaactcaatcccaaacccaaaaccgttaaaatgtatccggccaattgatagtagataatgaggtgtacagcgcatgataatttacacagtaaccaaaatgaaaatactttagtaattataagaaatatagatggtaacgtcatcatcaacaatccaataatatgccggagagtaaacattgacggataaaacaaaaatgctccgcataactctatcatggcaataacacaaccaaatacttgtaagattcctaaattagtagaaaatacaacggatatcgatgtataagtgatctcgagaaataataagaataaagtaatgcccgtaaagataaacatcaacattgtttggtaatcattaaaccaattagtatgaagttgaactaatttcacagtagattttattccagtgttatcctcgcatgtataagtacctggtaagatatctttatattctataatcaatgagacatcactatccgataacgaatgaagtctagcactagtatgccatttacttaatattgtcgtcttggaagttttattataagttaaaatatcatggttatccaatttccatctaatatactttgtcggattatctatagtacacggaataatgatggtatcattacatgctgtatactctatggtctttgtagttgttataacaaccaacgtatagaggtatatcaacgatattctaactcttgacattttttatttatttaaaatgatacctttgttatttattttattctattttgctaacggtattgaatggcataagtttgaaacgagtgaagaaataatttctacttacttattagacgacgtattatacacgggtgttaatggggcggtatacacattttcaaataataaactaaacaaaactggtttaactaataataattatatcacaacatctataaaagtagaggatgcggataaggatacattagtatgcggaaccaataacggaaatcccaaatgttggaaaatagacggttcagacgacccaaaacatagaggtagaggatacgctccttatcaaaatagcaaagtaacgataatcagttacaacgaatgtgtactatctgacataaacatatcaaaagaaggaattaaacgatggagaagatttgacggaccatgtggttatgatttatacacggcggataacgtaattccaaaagatggtttacgaggagcattcgtcgataaagatggtacttatgacaaagtttacattcttttcactgatactatcggctcaaagagaattgtcaaaattccgtatatagcacaaatgtgcctaaacgacgaaggtggtccatcatcattgtctagtcatagatggtcgacgtttctcaaagtcgaattagaatgtgatatcgacggaagaagttatagacaaattattcattctagaactataaaaacagataatgatacgatactatatgtattcttcgatagtccttattccaagtccgcattatgtacctattctatgaataccattaaacaatctttttctacgtcaaaattggaaggatatacaaagcaattgccgtctccagctcctggtatatgtttaccagctggaaaagttgtttcacataccacgtttgaagtcatagaaaaatataatgtactagatgatattataaagcctttatctaaccaacctatcttcgaaggaccgtctggtgttaaatggttcgatataaaggagaaggaaaatgaacatcgggaatatagaatatacttcataaaagaaaattctatatattcgttcgatacaaaatctaaacaaactcgtagctcgcaagtcgatgcgcgactattttcagtaatggtaacttcgaaaccgttatttatagcagatatagggataggagtaggaatgccacaaatgaaaaaaatacttaaaatgtaatcttaatcgagtacaccacacgacaatgaacaaacctaagacagattatgctggttatgcttgctgcgtaatatgcggtctaattgtcggaattatttttacagcgacactattaaaagttgtagaacgtaaattagttcatacaccatcaatagataaaacgataaaagatgcatatattagagaagattgtcctactgactggataagctataataataaatgtatccatttatctactgatcgaaaaacctgggaggaaggacgtaatacatgcaaagctctaaatccaaattcggatctaattaagatagagactccaaacgagttaagttttttaagaagccttagacgaggctattgggtaggagaatccgaaatattaaaccagacaaccccatataattttatagctaaaaatgccacgaagaatggaaatatatttgtagcacaacgaatactcccaaactgcattcgtgttacactatataacaattacactacatttttatcataccactacttcggttagatgttttagaaaaaaataaatatcgccgtaccgttcttgtttttataaaaataacaattaacaattatcaaattttttctttaatattttacgtggttgaccattcttggtggtaaaataatctcttagtgttggaatggaatgctgtttaatgtttccgcactcatcgtatattttgacgtatgcagtcacatcgtttacgcaatagtcagactgtagttctatcatgcttcctacatcagaaggaggaacagttttaaagtctcttggttttaatctattgccattagttttcatgaaatcctttgttttatccacttcacattttaaataaatgtccactatacattcttctgttaattttactagatcgtcatgggtcatagaatttataggttccgtagtccatggatccaaactagcaaacttcgcgtatacggtatcgcgattagtgtatacaccaactgtatgaaaattaagaaaacagtttaatagatcaacagaaatatttaatcctccgtttgatacagatgcgccatatttatggatttcggattcacacgttgtttgtctgaggggttcgtctagcgttgcttctacgtaaacttcgattcccatatattctttattgtcagaatcgcataccgatttatcatcatacactgtttgaaaactaaatggtatacacatcaaaataataaataataacgagtacattctgcaatattgttatcgtaattggaaaaatagtgttcgagtgagttggattatgtgagtattggattgtatattttattttatattttatattttatattttgtaataagaataaaatgctaatgtcaagtttattccaatagatgtcttattaaaaaacatatataataaataacaatggctgaatggcataaaattatcgaggatatctcaaaaaataataagttcgaggatgccgccatcgttgattacaagactacaaagaatgttctagctgctattcctaacagaacatttgccaagattaatccgggtgaaattattcctctcatcactaatcgtaatattctaaaacctcttattggtcagaaatattgtattgtatatactaactctctaatggatgagaacacgtatgctatggagttgcttactgggtacgcccctgtatctccgatcgttatagcgagaactcataccgcacttatatttttgatgggtaagccaacaacatccagacgtgacgtgtatagaacgtgtagagatcacgctacccgtgtacgtgcaactggtaattaaaataaaaagtaatattcatatgtagtgtcaattttaaatgatgatgatgaaatggataatatccatattgacgatgtcaataatgccggtattggcatacagctcatcgatttttagatttcattcagaggatgtggaattatgttatgggcatttgtattttgataggatctataatgtagtaaatataaaatataatccgcatattccatatagatataattttattaatcgcacgttaaccgtagatgaactagacgataatgtcttttttacacatggttattttttaaaacacaaatatggttcacttaatcctagtttgattgtctcattatcaggaaacttaaaatataatgatatacaatgctcagtaaatgtatcgtgtctcattaaaaatttggcaacgagtacatctactatattaacatctaaacataagacttattctctacatcggtccacgtgtattactataataggatacgattctattatatggtataaagatataaatgacaagtataatgacatctatgattttactgcaatatgtatgctaatagcgtctacattgatagtgaccatatacgtgtttaaaaaaataaaaatgaactcttaattatgctatgctattagaaatggataaaatcaaaattacggttgattcaaaaattggtaatgttgttaccatatcgtataacttggaaaagataactattgatgttacaccaaaaaagaaaaggatgtattattagcgcaatcagttgctgtcgaagaggcaaaagatgtcaaggtagaagaaaaaaatattatcgatattgaagatgacgatgatatggatgtagaaagcgcgtaatactatctataaacataagtatataataaatactttttatttacggtactcttgtagtggtgataccctactcgattatttttttaaaaaaaaaatacttattctgattcttctaaccatttccgtgttcgtttgaatgccacatcgacgtcaaagataggggagtagttgaaatctagttctgcattgttggtacgcacctcaaatgtagtgttggatatcttcaacgtatagttgttgagtagtgatggttttctaaatagaattctcttcatatcattcttgcacgcgtacatttttagcatccatcttggaatcctagatccttgttctattcccaatggtttcatcaatagaagattaaacatatcgtacgaacacgatggagagtaatcgtagcaaaagtaagcatttcctttaatcttagatcccggatactggatatattttgcagccaacacgtgcatccatgcagcatttcctacatatacccggctatgtaccgcgttatcatcgactgtacgatacataatgttaccgtgttgcttacattgctcgtaaaagactttcgtcaatttgtctccttctccgtaaattccagtgggtcttaggcaacaagtatacaattttgctccattcatgattacggaattattggctttcataaccagttgctcggccatacgtttactttttgcgtatacatgtcctggtgatatatcataaagggtatgctcatggccgatgaatggatcaccgtgtttattgggtcctattgcttccatgctactagtatagatcaaatacttgattcctaggtccacacaagctgccaatatagtctgtgttccataatagtttactttcatgatttcattatcggtgtattttccaaatacatccactagagcagccgtatgaataatcagatttaccccatctagcgcttctctcaccttatcaaagtcgtttatatcacattgtatatagtttataaccttaactttcgaggttattggttgtggatcttctacaatatctatgactctgatttcttgaacatcatctgcactaattaacagttttactatatacctgcctagaaatccggcaccaccagtaaccgcgtacacggccattgctgccactcataatatcagactacttattctattttactaaataatggctgtttgtataatagaccacgataatatcagaggagttatttactttgaaccagtccatggaaaagataaagttttaggatcagttattggattaaaatccggaacgtatagtttgataattcatcgttacggagatattagtcaaggatgtgattccataggcagtccagaaatatttatcggtaacatctttgtaaacagatatggtgtagcatatgtttatttagatacagatgtaaatatatttacaattattggaaaggcgttatctatttcaaaaaatgatcagagattagcgtgtgaagttattggtatttcttacataaatgaaaagataatacattttcttacaattaacgagaatggcgtttgatatatcagttaatgcgtctaaaacaataaatgcattagtttacttttctactcagcaaaataaattagtcatacgtaatgaagttaatgatacacactacactgtcgaatttgatagggacaaagtagttgacacgtttatttcatataatagacataatgacaccatagagataagaggggtgcttccagaggaaactaatattggttgcgcggttaatacgccggttagtatgacttacttgtataataagtatagttttaaactgattttagcagaatatataagacacagaaatactatatccggcaatatttattcggcattgatgacactagatgatttggctattaaacagtatggagacattgatctattatttaatgagaaacttaaagtagactccgattcgggactatttgactttgtcaactttgtaaaggatatgatatgttgtgattctagaatagtagtagctctatctagtctagtatctaaacattgggaattgacaaataaaaagtataggtgtatggcattagccgaacatatatctgatagtattccaatatctgagctatctagactacgatacaatctatgtaagtatctacgcgggcacactgagagcatagaggatgaatttgattattttgaagacgatgattcgtctacatgttctgccgtaaccgacagggaaacggatgtataattttttttatagcgtgaaggatatgataaaaaatataattgttgtatttatcccattccaatcaccttatatgattctgtaaaaaaattatactgtaacacaataaaggagtcttatagatgtatagaggtcagatactggtttgataaactgtttattccacataagtatgtttgactttatggttagacccgcatactttaacaaatcactgaaaattggagttaggtattgacctctcagaatcagttgccgttctggaacattaaatgtattttttatgatatactccaacgcatttatgtgggcatacaacaagtcattactaatggagtattccaagagttttagttgtctagtatttaacaagagaagagatttcaacagactgtttatgaactcgaatgccgcctcattgtcgcttatattgatgatgtcgaattctcccaatatcatcaccgatgagtagctcatcttgttatcgggatccaagttttctaaagatgtcattaaaccctcgatcatgaatggatttatcatcatcgtttttatgttggacatgagcttagtccgtttgtccacatctatagacgacgatttctgaattatttcatatatccctctctttaactccaggaacttgtcaggatggtctactttaatatgttctcgtctaagagatgaaaatctttggatggttgcacgcgacttttctctaaaggatgacgttgcccaagatcctctcttaaatgaatccatcttatccttggacaagatggacagtctattttccttagatggtttaatatttttgttacccatgatctataaaggtagacctaatcgtctcggatgaccatatatttattttcagttttattatacgcataaattgtaaaaaatatgttaggtttacgaaaatgtctcgtggggcattaatcgtttttgaaggattggacaaatctggaaaaacaacacaatgtatgaacatcatggaatctataccggcaaacacgataaaatatcttaactttcctcagagatccactgtcactggaaagatgatagatgactatctaactcgtaaaaaaacctataatgatcatatagttaatctattattttgtgcaaatagatgggagtttgcatcttttatacaagaacaactagaacagggaattactttaatagttgatagatacgcattttctggagtagcgtatgccgccgctaaaggcgcgtcaatgactctcagtaagagttatgaatctggattgcctaaacccgacttagttatattcttggaatctggtagcaaagaaattaatagaaacgtcggcgaggaaatttatgaagatgttacattccaacaaaaggtattacaagaatataaaaaaatgattgaagaaggagatattcattggcaaattatttcttctgaattcgaggaagatgtaaagaaggagttgattaagaatatagttatagaggctatacacacggttactggaccagtggggcaactgtggatgtaatagtgaaattacattttttataaatagatgttagtacagtgttataaatggatgaagcatattactctggcaacttggaatcagtactcggatacgtgtccgatatgcataccgaactcgcatcaatatctcaattagttattgccaagatagaaactatagataatgatatattaaacaaggacattgtaaattttatcatgtgtagatcaaacttggataatccatttatctctttcctagatactgtatatactattatagatcaagagaactatcagactgagttgattaattcattagacgacaatgaaattatcgattgtatagttaataagtttatgagcttttataaggataacctagaaaatatagtagatgctatcatcactctaaaatatataatgaataatccagattttaaaactacgtatgccgaagtactcggttccagaatagccgatatagatattaaacaagtgatacgtaagaatatactacaattgtctaatgatatccgcgaacgatatttgtgaaaaatattaaaaaaaaatactttttttattaaatgacgtcgcttcgcgaatttagaaaattatgctgtgatatatatcacgcatcaggatataaagaaaaatctaaattaattagagactttataacagatagggatgataaatatttgatcattaagctattgcttcccggattagacgatagaatttataacatgaacgataaacaaattataaaattatatagtataatatttaaacaatctcaggaagatatgctacaagatttaggatacggatatataggagacactattaggactttcttcaaagaaaacacagaaatccgtccaagagataaaagcattttaactttagaagacgtggatagtttcttaactacgttatcatccgtaactaaagaatcgcatcaaataaaattattgactgatatcgcatccgtttgtacatgtaatgatttaaaatgtgtagtcatgcttattgataaagatctaaaaattaaagcgggtcctcggtacgtacttaacgctattagtcctaatgcctatgatgtgtttagaaaatctaataacttgaaagagataatagaaaattcatctaaacaaaatctagactctatatctatttctgttatgactccaattaatcccatgttagcggaatcgtgtgattctgtcaataaggcgtttaaaaaatttccatcaggaatgtttgcggaagtcaaatacgatggtgaaagagtacaagttcataaaaataataacgagtttgccttctttagtagaaacatgaaaccagtactctctcataaagtggattatctcaaagaatacataccgaaagcatttaaaaaagctacgtctatcgtattggattctgaaattgttcttgtagacgaacataatgtaccgctcccgtttggaagtttaggtatacacaaaaagaaagaatataaaaactctaacatgtgtttgttcgtgtttgactgtttgtactttgatggattcgatatgacggacattccattgtacgaacgaagatcttttctcaaagatgttatggttgaaatacccaatagaatagtattctcagagttgacgaatattagtaacgagtctcagttaactgacgtattggatgatgcactaacgagaaaattagaaggattggtcttaaaagatattaatggagtatacgaaccgggaaagagaagatggttaaaaataaagcgagactatttgaacgagggttccatggcagattctgccgatttagtagtactaggtgcctactatggtaaaggagcaaagggtggtatcatggcagtctttctaatgggttgttacgacgatgaatccggtaaatggaagacggtaactaaatgttccggtcacgatgataatacgttaagggttttgcaagaccaattaacgatgattaaaattaacaaggatcccaaaaaaattccagagtggttagtagttaataaaatctatattcccgattttgtagtagaggatccgaaacaatctcagatatgggaaatttcaggagcagagtttacatcttccaagtcccataccgcaaatggaatatccattagatttcctagatttactaggataagagaggataaaacgtggaaagaatctactcatctaaacgatttagtaaacttgactaaatcttaatagttacatacaaactgaaaattaaaataacaccatttagttggtggtcgccatggatggtgttattgtatactgtctaaacgcgttagtaaaacatggcgaggaaataaatcatataaaaaatgatttcatgattaaaccatgttgtgaaagagtttgtgaaaaagttaagaacgttcacattggcggacaatctaaaaacaatacagtgattgcagatttgccatatatggataatgctgtatcggatgtatgcaattcactgtataaaaagaatgtatcaagaatatccagatttgctaatttgataaagatagatgacgatgacaagactcctactggtgtatataattattttaaacctaaagatgttattcctgttatcatatctataggaaaggataaagatgtctgtgaactattaatctcatcagacatatcgtgtgcatgcgtggagttaaattcatataaagtagccattcttcccatggatgtttccttttttaccaaaggaaatgcatcattgattattctcctgtttgatttctctatcgatgcagcacctctcttaagaagtgtaaccgataataatgttattatatctagacaccagcgtctacatgacgagcttccgagttccaattggttcaagttttacataagtataaagtccgactattgttctatattatatatggttgttgatggatctgtgatgcatgcgatagctgataatagaactcacgcaattattagcaaaaatatattagacaatactacgattaacgatgagtgtagatgctgttattttgaaccacagattaggattcttgatagagatgagatgctcaatggatcatcgtgtgatatgaacagacattgtattatgatgaatttacctgatgtaggcgaatttggatctagtatgttggggaaatatgaacctgacatgattaagattgctctttcggtggctggtaatttaataagaaatcgagactacattcccgggagacgaggatatagctactacgtttacggtatagcctctagataatttttttaagcacgaaataaaaaacataattttaaaccaatctatttcatactattttgtgtgatcaccatggacataaagatagatattagtatttctggtgataaatttacggtgactactaggagggaaaatgaagaaagaaaaaaatatctacctctccaaaaagaaaaaactactgatgttatcaaacctgattatcttgagtacgatgacttgttagatagagatgagatgtctactattctagaggaatattttatgtacagaggtctattaggcctcagaataaaatatggacgactctttaacgaaattaaaaaattcgacaatgatgcggaagaacaattcggtactatagaagaactcaagcagaaacttagattaaattctgaagagggagcagataactttatagattatataaaggtacaaaaacaggatatcgtcaaacttactgtatacgattgcatatctatgataggattgtgtgcatgcgtggtagatgtttggagaaatgagaaactgttttctagatggaaatattgtttacgagctattaaactgtttattaatgatcacatgcttgataagataaaatctatactgcagaatagactagtatatgtggaaatgtcatagaaagttaaaagttaatgagagcaaaaatatataaggttgtattccatatttgttattttttctgtaatagttaaaaaaatacattcgatggtctatctatcagattattatgtgttataaggtactttttctcataataaactagagtatgagtaagatagtgtttttcaaaacatataaatctaaaattgatggatgagatatacagctattaatttcgaaaatatattttaatctgataactttaaacatggatttttgatggtggtttaacgttttaaaaaaagattttgttattgtagtatatgataatattaaaagatggatataaagaatttgctgactgcatgtactattttttacattactacattggctacggcagatatacctactccgccaccaacgggtcatgtgacaagggagaatatcttgataagaggcataatcaatgttgtaatcggtgtccacctggagaatttgccaaggttagatgtaatggtaacgataacacaaaatgtgaacgctgcccacctcatacatataccacaatcccaattattctaatggatgtcatcaatgtagaaaatgcccaacaggatcatttgataaggtaaagtgtaccggaacacagaacagtaaatgttcgtgtcttcctggttggtattgcgctactgattcttcacagactgaagattgttgaaattgtataccaaaaaggagatgtccatgcggatactttggtggaatagatgaacaaggaaatcctatttgtaaatcgtgttgtgttggtgaatattgcgactacctacgtaattatagacttgatccatttcctccatgcaaactatctaaatgtaattaattatgattttgatgataatgttaccatacattatatcgctacttggttagtgtattattcagtatgaagacctattaataattacttatcttttgacgatcttgttataattataatataaaaatacttatggcatagtaactcataattgctgacgcgataaattcgtaataatctgttttgttcaaaggaatctacaggcataaaaataaaaatataatttataatatactcttacaacgccatcatgaataacagcagtgaattgattgctgttattaatggatttagaaatagtggacgattttgtgatattaatatagttattaatgatgaaaggataaacgctcataaactcatcctatctggagcctccgaatatttttccattctgttttccaataattttatcgattctaatgaatacgaagttaatctaagtcatttagattatcaaagtgttaacgatttgatcgattacatttatgggatacctttgagcctaactaacgataacgtgaaatatattctttcaaccgctgattttttacaaattggatctgccattacggagtgtgaaaattacatacttaaaaatctttgttctaaaaactgtatcgatttctacatatacgctgataaatataataacaagaaaatagaatcagcgtcgtttaacacaatattacaaaatattttgagactcatcaacgatgaaaactttaaatacttaacagaggaatcaatgataaaaattttaagcgatgatatgttaaatataaaaaatgaggatttcgccccactaattctcattaaatggttagagagtactcaacaatcatgcaccgtcgagttacttaaatgcctcagaatatcattgctttccccacaagttataaaatcactttatagtcatcgactggttagttcaatctacgaatgtataacattcttaaacaatatagcattcttggatgaatcatttcctagataccatagcatcgagttgatatctatcggtataagtaattcgcgtgataaaatttccataaactgctacaatcataaaaaaaatacatgggaaatgatatcttcacgtagatataggtgtagtttcgcagtggccgtcctggataatattatttatatgatgggtggatatgatcagtccccgtatagaagttcaaaggttatagcgtacaatacatgtacaaattcttggatatatgatataccagagctaaaatatcctcgttctaattgtgggggactggctgatgacgaatacatttattgtataggcggcatacgcgatcaggattcatcgttgacatctagtattgataaatggaagccatcaaaaccatattggcagaagtatgctaaaatgcgcgaaccaaaatgtgatatgggggttgcgatgttaaacggattaatatatgttataggtggaatcgttaaaggtgacacgtgtaccgacgcactagagagtttatcagaagatggatggatgaagcatcaacgtcttccaataaaaatgtccaatatgtcgacgattgttcatgatggcaagatttatatatctggaggttacaacaatagtagtgtagttaatgtaatatcgaatctagtccttagctataatccgatatatgatgaatggaccaaattatcatcattaaacattcctagaattaatcccgctctatggtcagcgcataataaattatatgtaggaggaggaatatctgatgatgttcgaactaatacatctgaaacatacgataaagaaaaagattgttggacattggataatggtcacgtgttaccacgcaattatataatgtataaatgcgaaccgattaaacataaatatccattggaaaaaacacagtacacgaatgattttctaaagtatttggaaagttttataggtagttgatagaacaaaatacataattttgtaaaaataaatcactttttatactaatatgacacgattaccaatacttttgttactaatatcattagtatacgctacaccttttcctcagacatctaaaaaaataggtgatgatgcaactctatcatgtaatcgaaataatacaaatgactacgttgttatgagtgcttggtataaggagcccaattccattattcttttagctgctaaaagcgacgtcttgtattttgataattataccaaggataaaatatcttacgactctccatacgatgatctagttacaactatcacaattaaatcattgactgctagagatgccggtacttatgtatgtgcattctttatgacatcgcctacaaatgacactgataaagtagattatgaagaatactccacagagttgattgtaaatacagatagtgaatcgactatagacataatactatctggatctacacattcaccagaaactagttctgagaaacctgattatatagataattctaattgctcgtcggtattcgaaatcgcgactccggaaccaattactgataatgtagaagatcatacagacaccgtcacatacactagtgatagcattaatacagtaagtgcaacatctggagaatccacaacagacgagactccggaaccaattactgataaagaagaagatcatacagtcacagacactgtctcatacactacagtaagtacatcatctggaattgtcactactaaatcaaccaccgatgatgcggatctttatgatacgtacaatgataatgatacagtaccatcaactactgtaggtagtagtacaacctctattagtaattataaaaccaaggactttgtagaaatatttggtattaccgcattaattatattgtcggccgtggcaatattctgtattacgtattatatatgtaataaacgttcacgtaaatacaaaacagagaacaaagtctagatttttgacttacataaatgtctgggatagtaaaatctatcatattgagcggaccatctggttcaggaaagacagccatagccaaaagactatgggaatatatttggatttgtggtgtcccataccactagatttcctcgtcctatggaacgagaaggtgtcgattaccattacgttaacagagaggccatctggaagggaatagccgccggaaactttctagaacatactgagtttttaggaaatatttacggaacttctaaaactgctgtgaatacagcggctattaataatcgtatttgtgtgatggatttaaacatcgacggtgttagaagttttaaaaatacttacctaatgccttactcggtgtatataagacctacctctcttaaaatggttgagaccaagcttcgttgtagaaacactgaagctaacgatgagattcatcgtcgcgtgatattggcaaaaacggatatggatgaggccaacgaagcaggtctattcgacactattattattgaagatgatgtgaatttagcatatagtaagttaattcagatactacaggaccgtattagaatgtattttaacactaattaaagacttaagacttaaaacttgataattaataatataactcgtttttatatgtggctatttcaacgtctaatgtattagttaaatattaaaacttaccacgtaaaacttaaaatttaaaatgatatttcattgacagatagatcacacattatgaactttcaaggacttgtgttaactgacaattgcaaaaatcaatgggtcgttggaccattaataggaaaaggtggatttggtagtatttatactactaatgacaataattatgtagtaaaaatagagcccaaagctaacggatcattatttaccgaacaggcattttatactagagtacttaaaccatccgttatcgaagaatggaaaaaatctcacaatataaagcacgtaggtcttatcacgtgcaaggcatttggtctatacaaatccattaatgtggaatatagattcttggtaattaatagattaggtgtagatctagatgcggtgatcagagccaataataatagattaccaaaaaggtcggtgatgttgatcggaatcgaaatcttaaataccatacaatttatgcacgagcaaggatattctcacggagatattaaagcgagtaatatagtcttggatcaaatagataagaataaattatatctagtggattacggattggtttctaaattcatgtctaatggcgaacatgttccatttataagaaatccaaataaaatggataacggtactctagaatttacacctatagattcgcataaaggatacgttgtatctagacgtggagatctagaaacacttggatattgtatgattagatggttgggaggtatcttgccatggactaagatatctgaaacaaagaattgtgcattagtaagtgccacaaaacagaaatatgttaacaatactgcgactttgttaatgaccagtttgcaatatgcacctagagaattgctgcaatatattaccatggtaaactctttgacatattttgaggaacccaattacgacgagtttcggcacatattaatgcagggtgtatattattaagtgtggtgtttggtcgatgtaaaatttttgtcgataaaaattaaaaaataacttaatttattattgatctcgtgtgtacaaccgaaatcatggcgatgttttacgcacacgctctcggtgggtacgacgagaatcttcatgcctttcctggaatatcatcgactgttgccaatgatgtcaggaaatattctgttgtgtcagtttataataacaagtatgacattgtaaaagacaaatatatgtggtgttacagtcaggtgaacaagagatatattggagcactgctgcctatgtttgagtgcaatgaatatctacaaattggagatccgatccatgatcaagaaggaaatcaaatctctatcatcacatatcgccacaaaaactactatgctctaagcggaatcgggtacgagagtctagacttgtgtttggaaggagtagggattcatcatcacgtacttgaaacaggaaacgctgtatatggaaaagttcaacatgattattctactatcaaagagaaggccaaagaaatgagtacacttagtccaggacctataattgattaccacgtctggataggagattgtatctgtcaagttactgctgtggacgtacatggaaaggaaattatgagaatgagattcaaaaagggtgcggtgcttccgatcccaaatctggtaaaagttaaacttggggagaatgatacagaaaatctttcttctactatatcggcggcaccatcgaggtaaccacctctctggaagacagcgtgaataatgtactcatgaaacgtttggaaactatacgccatatgtggtctgttgtatatgatcattttgatattgtgaatggtaaagaatgctgttatgtgcatacgcattcatctaatcaaaatcctataccgagtactgtaaaaacaaatttgtacatgaagactatgggatcatgcattcaaatggattccatggaagctctagagtatcttagcgaactgaaggaatcaggtggatggagtcccagaccagaaatgcaggaatttgaatatccagatggagtggaagacactgaatcaattgagagattggtagaggagttcttcaatagatcagaacttcaggctggtaaattagtcaaatttggtaattctattaattgttaaacatacatctgtttcagctaagcaactaagaacacgtatacggcagcagcttcctttatactctcatcttttaccaacacaaagggtggatatttgttcattggagttgataataatacacacaaagtatttggattcacggtgggttacgactacctcagactggtagagaatgatatagaaaagcatatcaaaagactttgtgttgtgcatttctgtgagaagaaagaggacatcaagtacgcgtgtcgattcatcaaggtatataaacctggggatgaggctacctcgacatacgtgtgcgctatcaaagtggaaagatgctgttgtgctgtgtttgcagattggccagaatcatggtatatggatactaatggtatcaagaagtattctccagatgaatgggtgtcacatataaaattttaattaatgtaactatagagaacaaataataggttgtaatatcatatagacaataactaacaattaattagtaactgttatctcttttttaactaaccaactaactatatacctattaatacatcgtaattatagttcttaacatctattaatcattgattcgcttctttaattttttataaactaacattgttaattgaaaagggataacatgttacagaatataaattatatatggatttttttaaaaaggaaatacttgactggagtgtatatttatctcttcattatatagcacgcgtgtgttccaattcttccacatcccatataatacaggattataatctcattcgaacatacgagaaagtggataaaacaatagttgattttttatctaggttgccaaatttattccatattttagaatatggggaaaatattctacatatttattctatggatgatgctaatacgaatattataattttttttctagatagagtattaaatattaataagaacgggtcatttatacacaatctcaggttatcatcatccattaatataaaagaatatgtatatcaattagttaataatgatcatccagataataggataagactaatgcttgaaaatggacgtagaacaagacattttttgtcctatatatcagatacagttaatatctatatatgtattttaataaatcatggattttatatagatgccgaagacagttacggttgtacattattacatagatgtatatatcactataagaaatcagaatcagaatcatacaatgaattaattaagatattgttaaataatggatcagatgtagataaaaaagatacgtacggaaacacaccttttatcctattatgtaaacacgatatcaacaacgtggaattgtttgagatatgtttagagaatgctaatatagactctgtagactttaatagatatacacctcttcattatgtctcatgtcgtaataaatatgattttgtaaagttattaatttctaaaggagcaaatgttaatgcgcgtaataaattcggaactactccattttattgtggaattatacacggtatctcgcttataaaactatatttggaatcagacacagagttagaaatagataatgaacatatagttcgtcatttaataatttttgatgctgttgaatctttagattatctattatccagaggagttattgatattaactatcgtactatatacaacgaaacatctatttacgacgctgtcagttataatgcgtataatacgttggtctatctattaaacagaaatggtgattttgagacgattactactagtggatgtacatgtatttcggaagcagtcgcaaacaacaacaaaataataatggaagtactattgtctaaacgaccatctttgaaaattatgatacagtctatgatagcaattactaaaaataaacaacataatgcagatttattgaaaatgtgtataaaatatactgcgtgtatgaccgattatgatactcttatagatgtacagtcgctacagcaatataaatggtatattttaaaatgtttcgatgaaatagatatcatgaagagatgttatataaaaaataaaactgtattccaattagttttttgtatcaaagacattaatactttaatgagatacggtaaacatccttctttcgtgaagtgcactagtctcgacgtatacggaagtcgtgtacgtaatatcatagcatctattagatatcgtcagagattaattagtctattatccaagaagctggatgcgggagataaatggtcgtgttttcctaacgaaataaaatataaaatattggaaaactttaacgataacgaactgtccacatatctaaaaatcttataaacactattaaaatataaaatctaagtaggataaaatcacactacatcattgtttccttttagtgctcgacagtgtatactatttttaacactcataaataaaaatgaaaacgatttccgttgttacgttgttatgcgtactacctgctgttgtttattcaacatgtactgtacccactatgaataacgctaaattaacgtctaccgaaacatcgtttaataataaccagaaagttacgtttacatgtgatcagggatatcattcttcggatccaaatgctgtctgcgaaacagataaatggaaatacgaaaatccatgcaaaaaaatgtgcacagtttctgattacatctctgaactatataataaaccgctatacgaagtgaattccaccatgacactaagttgcaacggcgaaacaaaatattttcgttgcgaagaaaaaaatggaaatacttcttggaatgatactgttacgtgtcctaatgcggaatgtcaacctcttcaattagaacacggatcgtgtcaaccagttaaagaaaaatactcatttggggaatatatgactatcaactgtgatgttggatatgaggttattggtgcttcgtacataagttgtacagctaattcttggaatgttattccatcatgtcaacaaaaatgtgatataccgtctctatctaatggattaatttccggatctacattttctatcggtggcgttatacatcttagttgtaaaagtggttttatactaacgggatctccatcatccacatgtatcgacggtaaatggaatcccgtactcccaatatgtgtacgaactaacgaagaatttgatccagtggatgatggtcccgacgatgagacagatttgagcaaactctcgaaagacgttgtacaatatgaacaagaaatagaatcgttagaagcaacttatcatataatcatagtggcgttaacaattatgggcgtcatatttttaatctccgttatagtattagtttgttcctgtgacaaaaataatgaccaatataagttccataaattgctaccgtaaatataaatccgttaaaataattaataattaataattaataattaataacgaacaagtatcaaaagattaaagacttatagctagaatcaattgagatgtcttcttcagtggatgttgatatctacgatgccgttagagcatttttactcaggcactattataacaagagatttattgtgtatggaagaagtaacgccatattacataatatatacaggctatttacaagatgcgccgttataccgttcgatgatatagtacgtactatgccaaatgaatcacgtgttaaacaatgggtgatggatacacttaatggtataatgatgaatgaacgcgatgtttctgtaagcgttggcaccggaatactattcatggaaatgtttttcgattacaataaaaatagtatcaacaatcaactaatgtatgatataattaatagcgtatctataattctagctaatgagagatatagaagcgcttttaacgacgatggtatatacatccgtagaaatatgattaacaagttgtacggatacgcatctctaactactattggcacgatcgctggaggtgtttgttattatctgttgatgcatctagttagtttgtataaataattatttcaatatactagttaaaattttaagattttaaatgtataaaaaactaataacgtttttatttgtaataggtgcattagcatcctattcgaataatgagtacactccgtttaataaactgagtgtaaaactctatatagatggagtagataatatagaaaattcatatactgatgataataatgaattggtgttaaattttaaagagtacacaatttctattattacagagtcatgcgacgtcggatttgattccatagatatagatgttataaacgactataaaattattgatatgtataccattgactcgtctactattcaacgcagaggtcacacgtgtagaatatctaccaaattatcatgccattatgataagtacccttatattcacaaatatgatggtgatgagcgacaatattctattactgcagagggaaaatgctataaaggaataaaatatgaaataagtatgatcaacgatgatactctattgagaaaacatactcttaaaattggatctacttatatatttgatcgtcatggacatagtaatacatattattcaaaatatgatttttaaaaatttaaaatatattatcacttcagtgacagtagtcaaataacaagctggccgcataacttcgtataatgtatgctatacgaagttatgtcgacgatgttcccaatttcaaggacaaaatggccagagttatcaagagaaaatttaataaacagtctcaatcttatttaactaaatttctcggtagcacatcaaatgatgttaccacttttcttagcatgcttaacttgactaaatattcataactaatttttattaatgatacaaaaacgaaataaaactgcatattatacactggttaacgcccttataggctctaaccattttcaagatgaggtccctgattatagtccttctgttcccctctatcatctactccatgtctattagacgatgtgagaagactgaagaggaaacatggggattgaaaatagggttgtgtataattgccaaagatttctatcccgaaagaactgattgcagtgttcatctcccaactgcaagtgaaggattgataactgaaggcaatggattcagggatatacgaaacaccgataaattataaaaaaagcaatgtgtccgctgtttccgttaataatactattttcgtaactggcggattattcataaataactctaatagcacgatcgtggttaacaatatggaaaaacttgacatttataaagacaaacaatggtcgattatagaaatgcctatggctagggtatatcacggcatcgactcgacatttggaatgttatattttgccggaggtctatccgttaccgaacaatatggtaatttagagaaaaacaacgagatatcttgttacaatcctagaacgaataagtggtttgatatttcatatactatttataagatatccatatcatcattgtgtaaactaaataacgtcttctatgtatttagtaaggacattggatatgtggaaaagtatgatggtgcatggaagttagtacatgatcgtctccccgctataaaggcattatcaacttctccttattgattgaaaatgaaaatataaatagtttttatgtatagcagtattaccctatagttttattgcttactactaacatggatacagatacagatacagatacagatacagatacagatacagatacagatacagatgttacaaatgtagaagatatcataaatgaaatagatagagagaaagaagaaatactaaaaaatgtagaaattgaaaataataaaaacattaacaagaatcatccaagtggatatattagagaagcactcgttattaatacaagtagtaatagtgattccattgataaagaagttatagaatgtatcagtcacgatgtaggaatatagatcatatctactaatttttataatcaatacaaaacataaaaaacaactcgttattacatagcaggcatggaatccttcaagtattgttttgataacgatggcaagaaatggattatcggaaatactttatattctggtaattcaatactctataaggtcagaaaaaatttcactagttcgttctacaattacgtaatgaagatagatcacaaatcacacaagccattgttgtctgaaatacgattctatatatctgtattggatcctttgactatcgacaactggacacgggaacgtggtataaagtatttggctattccagatctgtatggaattggagaaaccgatgattatatgttcttcgttataaagaatttgggaagagtattcgccccaaaggatactgaatcagtcttcgaagcatgtgtcactatgataaacacgttagagtttatacactctcgaggatttacccatggaaaaatagaaccgaggaatatactgattagaaataaacgtctttcactaattgactattctagaactaacaaactatacaagagtggaaactcacatatagattacaacgaggacatgataacttcaggaaatatcaattatatgtgtgtagacaatcatcttggagcaacagtttcaagacgaggagatttagaaatgttgggatattgcatgatagaatggttcggtggcaaacttccatggaaaaacgaaagtagtataaaagtaataaaacaaaaaaaagaatataaaaaatttatagctactttctttgaggactgttttcctgaaggaaatgaacctctggaattagttagatatatagaattagtatacacgttagattattctcaaactcctaattatgacagactacgtagactgtttatacaagattgaaattatattctttttttatagagtgtggtagtgttacggatatctaatattaatattagactatctctatcgcgctacacgaccaatatcgattactatgaatatcttctatgaaaggagagaatgtattcatttctccagcgtcaatctcgtcagtattgacaatactgtattatggagctaatggatccactgctgaacagctatcaaaatatgtagaaacggaggagaacacggataaggttagcgctcagaatatctcattcaaatccataaataaagtatatgggcgatattctgccgtgtttaaagatttctttttgggaaaaattggcgataagtttcaaactgttgacttcactgattgtcgcactatagatgcaatcaacaagtgtgtagatatctttactgaggggaaaatcaatccactattggatgaaccattgtctcctagcaattagtgccgtatactttaaagcaaaatggttgacgccattcgaaaaggaatttaccagtgattatcccttttacgtatcaccaacggaaatggtagatgtaagtatgatgtctatgtacggcgagctatttaatcacgcatctgtaaaggaatcattcggcaacttttcaatcatagaactgccatatgttggagatactagtatgatggtcattcttccagacaagattgatggattagaatccatagaacaaaatctaacagatacaaattttaagaaatggtgtaactctctggatgctatgtttatagatgttcacattcccaagtttaaggtaacaggctcgtataatctggtggatactctagtaaaatccgctgatggaaacacagtgaatgctagattgtccagcgtgtccccaggacaaggtaaggactctcccgcgatcactcgtgaagaagctctggctatgatcaaagactgtgaggtgtctatcgacatcagatgtagcgaagaagagaaagacagcgacatcaagacccatccagtactcgggtctaacatctctcataagaaagtgagttacgaagatatcatcggttcaacgatcgtcgatacaaaatgtgtcaagaatctagagtttagcgttcgtatcggagacatgtgcaaggaatcatctgaacttgaggtcaaggatggattcaagtatgtcgacggatcggcatctgaaggtgcaaccgatgatacttcactcatcgattcaacaaaactcaaagcgtgtgtctga

SEQ ID NO: 16 - DNA, 158638 bp, synthetic construct
  misc_feature 1..158638: note = SKV-UL40 recombinant virus
  source 1..158638: mol_type = other DNA
tcagacacacgctttgagttttgttgaatcgatgagtgaagtatcatcggttgcaccttcagatgccgatccgtcgacatacttgaatccatccttgacctcaagttcagatgattccttgcacatgtctccgatacgaacgctaaactctagattcttgacacattttgtatcgacgatcgttgaaccgatgatatcttcgtaactcactttcttatgagagatgttagacccgagtactggatgggtcttgatgtcgctgtctttctcttcttcgctacatctgatgtcgatagacacctcacagtctttgatcatagccagagcttcttcacgagtgatcgcgggagagtccttaccttgtcctggggacacgctggacaatctagcattcactgtgtttccatcagcggattctgagatggatttaatctgaggacatttggtgaatccaaagttcattctcagacctccaccgatgatggagtaataagtggtaggaggatctacatcctcgactgatgtggaatcatcttctgattccacctcgggatctggatctgactcggactctgtaatttccgttacggattggcaaatcttatcattggtcggtgtttggtcttgctttgtgactttgataataacatcgattcccatatgatgtttgttttcttcttccgtacacgaggaggaggatgaggatgattgctgaagactggcaggcacatgcatgccaggacgatatattgtttcataattgctattgattgagtactgttctttatgattctacttccttaccatgcaataaattagaatatattttctacttttacgagaaattaattattgtatttattatttatgggtgaaaaacttactataaaaagcgggtgggtttggaattagtgatcagtttatgtatatcgcaactaccgggcatatggctatcgacatcgagaacattacccacatgataagagattgtatcagtttcgtagtcttgagtattggtattactatatagtatatagatgtcgacgctagatatacagtctccgaatgcggcatgataccgtcatcattctttgctttcgttaactgtttggaggaagaatctttgttattgcatttaatctcgaaattcagagtgcacacctttctcctgtaaagaatcctgaagtcgctaccttattaagaacggagaagtatccatcacgaaatacgggattacagtctttatgattcatagtaatagttagttccgacgttgagatggattcactgagaccggtagtggtcgtccgagtacacgacgtgtcgttgacgggatacagattaatttccacatcgatatagttaaaggtatttctgggtacgggttcgcatttatctgcggaagagacggtgtgagaatatgttccgagaccacacggagaacagatgacgtctccggatactccgtatcctattccacattttgtttgggaaacacatgccttgcatccggatgatcctttgagaagacaataatatccgggagagcattcacagattctattgtgagtagtgttacacgatcgcgtcttccgttacaacttagacaagcgggtaaatgattattgcgagatgtgaaggtacccgaaccacacggcgtacattgtgtgttagtcttgctatcgcataatctggaagcgtatgttcccggacacaaattatggcgtttgtattcgttgtctttacactttccatcggatggtgcatgcggtgctatatctcttccgtttattattatacatgagagaaacaatatatacgagtataatacggacttcataatttaataatgtagtaatcgttgtcgtgttcctgtttcctacttctccaatcatatagatattttctttctatcatggataatatttgtaatggttctttccgtacaacatactgtttagatgatattgcgcataatttccggaggcaaatacgatagtctagattgaccgatggtagactctaatttattgagtgctttgtcgacgagtttacttttacgctccatcgatagatggcactgttctatgagatcgtcgtacatgggaaatgaaatgtgtctgtccgaatgtatggcttcaagatagctgtgataccgtatacaggtcggtgtcggagattcgaatctctttgaggcgacttatgtcacgatgatggaatctatcttatcgaatgatatatttttcataaatacacttttatagtcctcgtttaaacagaatttactatgtagttccgcgaatgactcgtcccttaataggcagtaggctagtatcttttttacgtagtaatcgtcgtagggagagaattctgacatcttgtagaacaacgatttaatcataggtagagatactttcagtctgtggtggatgatgtcattcacaacatccgccttgtatatgatgtttctgttttcaaacaccaagtcgaataccgtctttagtcggaaggttgatgtcgtatccgatgtatgaggcaacattgttgttacaattttgaaaggcggtattatagtattcgtctttctgaatgtcgaacctatctagtagataccgtagtatattgagagtgtatccttgattatgttttatgaatagataaagtagatgttgtccttcttccttttgttcgtgccaattgagtaacattatgagaatatgacctgttgcacaatcgttccatgatgggtgtacaatcaagattattacgtatcctcgagataaaagagcatacaccacacgaggactatgtttggtatactgttgaaggtaagtgtgtaaccgcgttaatgtttgctccataatctattatcgcgtagatgaatcgcttctcggctcgcatcttagtgtgacttaacttgtaataattgcttttgtagaacgtggatatgtgtttacagtagtaatgaagagaagtgagttcatcctcgtcggcgcaattagggtcggatcctttgtacagaacgtagtagtttaagctcccattgaatttatatctaagataacacagcaatagatcggatgatttactaaagtcatcaatggtgtccgttagtatatcaaagatcttgttatcgattgatagtgaatgaatcagatagtggtgtcctttttcatccttgctatcaaagttacgcatgccgtggtgtaacaatatctttaatacagatggattaaatcgtgtattcatcgtatagcaatgtaatggagagttacctcgtttattcagatcgcagtgtttaataactagcttaaacagatgagacgatgtatccacatcaaagaacgtaaaatacatatgacaaacattgttgacagaaacgtgaccttcattcttaccgtcgtccataaatacgttaggtatgtaccacatactgtcgcgaacgatgctcacaatctcgtccatctcgcccatctcatacatttcatcatttactttttcataattagagatgtacgaaagaaaaagaaaaagaaaaagaaaaacagaacaatatatttttttagtaatgtttatgcgagacatataaaataaactccgtgtttatgatgccggtaaatgtttttatcatcttggacggaatcgattttgtaatatgtcatggaaacaaatgaaacaggacattatcactccatgataaattatttaatggagtaataaagtatctccatgggtaatttcgaaatcaagttatcgtctgtattaatgttgtccactatggagtcgatcctctcactgttctttacagtttctgtaatgatggacgttagttcttttttgtaccatttgatgtcggattctttgcgtatctcagtctgtggcgtttgcttcgtttaaataatatatcaaacatggagacgcctgatatgtaggcattcttcattctattaatgtctactctatagcgctttagttccttatgatgaccggcgatatcatacttactttagaaggaaaatcatcatctaggattaaggcgtatctgatacaggcgaataatggttcaggatatagatagcgtatatctctattaaatgcgtcaatcatagtctctagagtgggatggtagctaagtaataaatcaactatcctcgttttgttttctctttggtaactgcttttctggatggccgtattgattatcgagcgtgatgttgtaacactcgctccatattccaataaccgctttgcaaattgtatattattgacatcgaccgcgtaatatagtagagttttattctcattatcgatcatatctatatcatccatgtacttgcttagtatatcaaatacatctattagtatggtttcataacagtgatacccgcaattattaaatctcgataatatcagaccgtacatacatagacggccattgttagatatgtgatttacagccgcgtgtccatattttccacgataaaccttacgacgtttacatcgacgagattattattaacaaagtagtcgtgcagaggatagttgttgtccgttatctaacatgcatcgaacgaccatatcgccgtaatgtaagtagtttatcaacatggcttgtacgatggattcatcctgttgtctaaatctctttagaatgttatcgatgatgtagtggttatattctctggaatcgtacgaagtaatactacgcattacgtcgacaagagtatgacgtctctcaataagaagattaacgatttccatgtctacattatatggggttactctaaatcgcttgtttagataatacgcctctaatatagggctgacgtcgtatactctacacgtgtccacatcctttattaataataatttaacaatctctatatctatggttgagaaagaccagtagtattggatgggtaaagatcctccttcgtctctgccatggatggaaacattgttattgatcaaacatttaattacatccttggatagagattgagattctctatgagacgatatatagtaatgaagagagttcttacacatatcactgttgtacatacaggtacgaaatacgtaaccggtgctgtaacattctgatttaagaagccatagcaatacttctggtctcggattaggcgtcgttacgtatatatccaccaatccgagaccattgattgcataattcgtattcttggacggacgtatccgtttatccacaattaggtattttagcagacgtaagtcgatattatccgaagacagatcgaaatcatttatattcgacttgagttcgttagaggaattcgaatagctggatatcagtagatgcacaatctgagattttacgtatctatgcttactgtatgctcctagcggagttaatccttcgttgtttctacaaagtctctcgactccgcgagagagtaacagtcgaacaatcttaatgtctgtatcgcatttattggagacgtaacaatgtagcgcattgtttcctcgtctatctatatgttttgataagttgtgacacgtttcaatctctagttttatttttttgtacgtcacatcttcatccagtagacgacatagaatagtgcactctctaccacaataatccatagctattctggtgctaattattcctatttcacgaaaaatgatgaaggcaatcattcctcataagatgataaaaagtgtagtgagagagcatgaaggagatttagtatttagcagtgcggatatgatccaagagggtgagatagtcgttctcgttcagaatctttcgcagcataagtagtatgtcgatatacttatcgttgaagactcttccagagacgatagctgattgagtacaaagtccaatgattgcacgaagttcttcggcggttttcatggagtcatttctgatgaaacatttaatgatctccacgcaattgtcgatattgtcccacggaagtgaatccttcaactcaccaccaaagagctccgttgcatcagttctgaaagagatgagaagcctgtagagagaccctgcgctttctctatgggtccatctatgagaaacccacaggatgtattcagtcagacaatgtctgacgtcggccacggtattcagggagtccttagtagcgtggcaatgacagggtctgaactgggcacaaggaaaggccattgtaaaggtagacctgtagccgtttatgctaatagagggctttaatttccatttttttaatgggttgtggatgaggaatgagagtgatatcatattgagatacgtagttatgtagaggtgtatttcctatattatttactttcggtttcatattttaccaactctttaataaatttcttttcacgatgcatcttattgaatgacgttttctcataagtggacatatagatgcagaagtaatgaagaaaagtattacctctatcatctacataattagggtctgctcctttttttaacaacttatacagtacgtagtagtagtttatcggttttaaatcaagtctagaatatatagtggattaatatatttttatattagctaaagctatctatactatcagaaagcatatcattctcaacttcatcatgagttaaatatttgtgtaatggatgtcatgaacattaaacgtattcatgacatactcctttaataggttttttaaaacagatgattcaaatccttcattcattagataacagtgtaacggagtcgtaccttctactagtttgtttatatcacagcattctacaaacagtctaaacaatagagaagacggacagactttaacgtataaatgacacatgttatcgatattcgttgatgaattattattaaacgtagttatgataaatgattctaacgacatctctcgctagagataaaatctagtatcgtatcattaaacatctttgcatcatactcgcatagcatagtttttcataattaatacaatatttaaaagacttattcggaaagtattttaatacatgtatcatcgatggagatccatatgaggagtcacttgtagttcttcagtagtaataacagtgctatcatcgatagtataattatatgtagaaggttcatatgttgttgtaattggagtaactgttggtagttcttccgtggaatcaataattatactaacagcaatagtataattatataaatatgttccgttgatatcacatattttaatgaactcatttctaacaccctcagctatatctgtccaattaaatgtagccaacaatctactacgttctctttgattgactacttgtacggtagcgacgctacactatctttattgtcttctacatgctccaattgaatgtcatgatacaacgcagtttttcttatgcatgtttcataacaccacgaacatgtcgcagtaagatatatagccagagataatttctgtaaattcatgattgccggtcataaacaagcccgtcaataattgtggctatatattcagtttatagagcaaaataattaagcacaatagcgcttaatctcaaaatatgttatgtttatttttttcatattaaacatactggttaaaatcctctaaaggctgatcttcatctataaatcaagatcataattacatttagacagtggtttcatgtttataaaaatgttctttttgtgtgaataaggaatatactaatcaataatcaaccatcgaccccattacgatagtatgcaggcaaccccccattagagaggtacgtgtaatcagtctctccagttttagtatttttataagtcattgttacataaacggcttttaaacagtctcctcgataataagccatatctggaaatttattaaatactcgagtcattttacgcacggtcaaaaaagtaagtaatgtcgacgacttcttacattctatagaaacacctagaatactcattttcttttggaaaatatcctcagactctgatttgaacaatgcacgacctatagtaaaccgtgaccaataagttatattagtcaatggtatatccaaaccatcaggtgtggatagtccagtctttggtatcgatagtgtagttattgaactgagaagttaccgtatagtctttttggtcatctctaaacaaggaaactaatacctctacactattgaacgatttatcttccgtaatgggtggactagcgatggatgaagtcacgaatataagacacgctattaatccgtatatcatcattttgatattacttataataacgatttgtttaatttttagtttatactattaattgtaaatgatattattatttttttaagtattatcagctttagtttatactattactatttgtaatatttagacatagataaacgtgataaaagtctatttgtttatatttattgcggatagcagtatttccctataaaaagtatacgtcctgtggtgtctttaatcatgtacatgaatggatggtttatgtagaccttcgtacgatataccatcgaaaagttaatcgtaaatactcctgtaacggccgatgcttctgtatactcctcattaacatctataaacgtcgtatgtagaaatttttctacagtgatagtttcattacacatcttgctaaaatctgcataatatccgaatatattagtaagtcctaaattttctaaaatcggtaccagattatacggttctgtcatttccactttaaactttggcatatacaagtctatacttttagtagataacataccacaccattttttaaatttttcatctgttatatttttttctatgttatatataccttctatgtcgtccggtagtataatcaccatactagagtttccctcgtatggaatatcgataatagagaatcctccgaataattcattaatatgtacatattgcaagttattctcggtacccaccatcatatcaacactggtaactatattcttagaaatataaaacttgtctgtatatgtaagatgtttagaaaatggatatttccacattgctttaaaatggacggcgctaacaactgtcatacgagtattaatggatagcggactagtcaataaggaattaattttaccatttgtcattgtcttaacccattcgttgattagttcctttgtttggttagcattattaaagtttacagtttgaaaatcgtcttttattttttgtaggaaggaggcgtggaactcgatactatcgctaccgtatattttatttgcggtagctagtgtcgcacaatacggaatatctacgtccatgtcattattgtcatcgggtgtattctcattcatattctctatatattttgatagttgttcagctgtagaaccagctgctccatgatttagaatagataaagtagataaaatagaaactggagaaatcaaaacattttcatcagggtgttttacgattagttctttaaagatatccatggtatagaccaaacaataacgataacgatatatatcataaataaataatgttaaatttcagtttatgtttgtaccccgtattcatacttaacaaattggtattgcgtacacaatcaatcatattacataccattaataatgcaagcataaaaaatcgttagtagatgtttctaaatataggttccgtaagcaaagaatataagaatgaagcggtaatgataaaatcaatcgttatctaaaatgatcatactcatttattttattctattatattaacacatacatttttaacagcaacacattcaatattgtattgttatttttatattatttacacaattaacaatatattattagtttatattactgaattaataatataaaattcccaatcttgttataaacacacactgagaaacagcataaacacagaatccatcaaaaatgtcgatgaaatatctgatgttgttgttcgctgctatgataatcagatcattcgccgatagtggtaacgctatcgaaacgacattgccagaaattacaaacgctacaacagatattccagctatcagattatgcggtccagagggagatggatattgtttacacggtgactgtatccacgctagagatatcgacggtatgtattgtagatgctctcatggttatacaggcattagatgtcagcatgtagtattagtagactatcaacgttcagaaaacccaaacactacaacgtcatatatcccatctcccggtattatgcttgtattagtaggcattattattattattacgtgttgtctattatctgtttataggttcactcgaagaactaataaactacctctacaagatatggttgtgccataatttttataaattttttttatgagtatttttacaaaaatgtataaagtgtatgtcttatgtatatttataaaaatgctaaatatgcgatgtatctatgttatttgtatttatctaaacaatacctctacctctagatattatacaaaaattttttatttcagcatattaaagtaaaatctagttaccttgaaaatgaatacagtgggtggttccgtatcaccagtaagaacataatagtcgaatacagtatccgattgagattttgcatacaatactagtctagaaagaaatttgtaatcatcttctgtgacgggagtccatatatctgtatcatcgtctagtttatcagtgtcccatgctatattcctgttatcatcattagttaatgaaaataactctcgtgcttcagaaaagtcaaatattgtatccatacatacatctccaaaactatcgcttatacgtttatctttaacgatacctatacctagatggttatttactaacagacattttccagatctattgactataactcctatagtttccacatcaaccaagtaatgatcatctattgttatataacaataacataactcttttccgtttttatcagtatgtatatctatattaacgtcgtcgttgtagtgaatagtagttattgatctattatatgaaacggatatgtctagaacggcaattgttttacgtccagttaacactttctttgatttaaagtctagagtctttgcaaacataatatccttatccgactttatatttcctgtagggtggtataattttattttgcctccacatatcggtgtttccaaatatattactagacaatattccatatagttattagttaagggtacccaattagaacacgtacgcttattatcatcatttggatcgtatttcataaaagttattgtactatcgatgtcaacacattctacattttttaatcgtctatatagtatttttctgatattttctataatatcagaattgtcttccatcggaagttgtatactatcagaatcagttacatgtttaaataattctctgatgtcattccttatacaatcaaattcattattaaacagtttaatagtctgtagacctttatcgtcgtaaatatccattgtcttattagttacgcttatttttatgtgtttttacgttgctttattatattttataagaatgattgtttgacgaatcacgagaactattaagacatatattattagaggtatatattataaaaaagtttttgattacgatgttataagaggaaagaggacacattaacatcatacatcaattaactacattcttataacatcgtaatcaaaagaattgcaattttgatgtataacaactgtcaatgggttatggaattgtatattacatattatacggtatgttggtaacgacaaataccgatcggtaattgtctgccggtgtaatagaattatatatatctatctattacaccggctgagtacctacactattatatgattatagtttctatttttacagtaccttaactaaagtctctagtcacaagagcaatactaccaacctacactattatatgattatagtttctatttttataggaacgcgtacgagaaaatcaaatgtctaatttctaacggtagtgttgataaacgattatcgtcaatggatacctcctctatcatgtcgtctattttcttactttgttctattaacttattagcattatatattatttgattataaaacttatattgcttattagcccaatctgtaaatatcggattattaacatatcgtttctttgtaggtttatttaacatgtacatcactgtaagcatgtccgtaccatttattttaatttgacgcatatccgcaatttctttttcgcagtcggttataaattctatatatgatggatacatgctacatgtgtacttataatcgactaatatgaagtacttgatacatattttcagtaacgatttattattaccacctatgaataagtacctgtgatcgtctaggtaatcaactgttttcttaatacattcgatggttggtaatttactcagaataatttccaatatcttaatatataattctgctatttctggaatatatttatctgccagtataacacaaatagtaatacatgtaaacccatattttgttattatattaatgtctgcgccattatctattaaccattctactaggctgacactatgcgacttaatacaatgataaagtatactacatccatgtttatctattttgtttatatcatcaatatacggcttacaaagttttagtatcgataacacatccaactcacgcatagagaaggtagggaataatggcataatatttattaggttatcatcattgtcattatctacaactaagtttccattttttaaaatatactcgacaactttaggatctctattgccaaatttttgaaaatatttatttatatgcttaaatctatataatgtagctccttcatcaatcatacatttaataacattgatgtatactgtatgataagatacatattctaacaatagatcttgtatagaaactgtatatcttttaagaattgtggatattaggatattattacgtaaactattacacaattctaaaatataaaacgtatcacggtcgaataatagttgatcaactatataattatcgattttgtgatttttcttcctaaactgtttacgtaaatagttagatagaatattcattagttcatgaccactatagttactatcgaataacgcgtcaaatatttcccgtttaatatcgcatttgtcaagataataatagagtgtggtatgttcacgataagtataataacgcatctcttttttgtgtgaaattaaatagtttattacgtccaaagatgtagcataaccatcttgtgacctagtaataatataataatagagaactgttttacccattctatcatcataatcagtggtgtagtcgtaatcgtaatcgtctaattcatcatcccaattataatattcaccagcacgtctaatctgttctattttgatcttgtatccatactgtatgttgctacatgtaggtattcctttatccaataatagtttaaacacatctacattgggatttgatgttgtagcgtatttctctacaatattaataccatttttgatactatttatttctatacctttcgaaattagtaatttcaataagtctatatcgatgttatcagaacatagatattcgaatatatcaaaatcattgatatttttatagtcgactgacgacaataacaaaatcacaacatcgtttttgatattattatttttcttggtaacgtatgcctttaatggagtttcaccatcatactcatataatggatttgcaccactttctatcaatgattgtgcactgctggcatcgatgttaaatgttttacaactatcatagagtatcttatcgttaaccatgattggttgttgatgctatcgcattttttggtttctttcatttcagttatgtatggatttagcacgtttgggaagcatgagctcatatgatttcagtactgtagtgtcagtactattagtttcgatcagatcaatgtctagatctatagaatcaaaacacgataggtcagaagataatgaatatctgtacgcttctttttgtactgtaacttctcgttttgttagatgtttgcatcgtgctttaacatcaatggtacaaattttatcctcgctttgtgtatcatattcgtccctactataaaattgtatattcagattatcatgagatgtgtatacgctaacggtatcaataaacggagcacaccatttagtcataaccgtaatccaaaaatttttaaagtatatcttaacgaaagaagttgtatcatcgttaggatttggtaaatcattatctacagtgtatggtactagatcctcataagtgtatatatctagagtaatgtttaatttatcaaatggttgataatatggatcctcatgacaatttccgaagatggaaatgagatatagacatgcaataaatctaatcgaagacatggttactccttaaaaaaatacgaataatcaccttggctatttagtaagtgtcatttaacactatactcatattaatccatggactcataatctctatacgggattaacggatgttctatatacggggatgagtagttctcttctttaactttatactttttactaatcatatttagactgatgtatgggtaatagtgtttgaagagctcgttctcatcatcagaataaatcaatatctctgtttttttgttatacagatgtattacagcctcatatattacgtaatagaacgtgtcatctaccttattaactttcaccgcatagttgtttgcaaatacggttaatcctttgacctcgtcgatttccgaccaatctgggcgtataatgaatctaaactttaatttcttgtaatcattcgaaataatttttagtttgcatccgtagttatcccctttatgtaactgtaaatttctcaacgcgatatctccattaataatgatgtcgaattcgtgctgtatacccatactgaatggatgaacgaataccgacggcgttaatagtaatttactttttcatctttacatattgggtactagttttactatcataagtttataaattccacaagctactatggaataagccaaccatcttagtataacacacatgtcttaaagtttattaattaattacatgttgttttatatatcgctacgaatttaaacagagaaatcagtttaggaaaaaaaattatctatctacatcatcacgtctctgtattctacgatagagtgctactttaagatgagacatatccgtgtcatcaaaaatatactccattaaaatgattattccggcagcgaacttgatattggatatatcacaacctttgttaatatctacgacaatagacagcagtcccatggttccataaacagtgagtttatctttctttgaagagatattttgtagagatcttataaaactgtcgaatgacatcgcatttatatctttagctaaatcgtatatgttaccatcgtaatatctaaccgcgtctatcttaaacgtttccatcgctttaaagacgtttccgatagatggtctcatttcatcagtcatactgagccaacaaatataatcgtgtataacatctttgatagaatcagactctaaagaaaacgaatcggctttattatacgcattcatgataaacttaatgaaaaatgtttttcgttgtttaagttggatgaatagtatgtcttaataattgttattatttcattaattaatatttagtaacgagtacactctataaaaacgagaatgacataactagttatcaaagtgtctaggacgcgtaattttcatatggtatagatcctgtaagcattgtctgtattctggagctattttctctatcgcattagtgagttcagaatatgttataaatttaaatcgaataacgaacataactttagtaaagtcgtctatattaactcttttattttctagccatcgtaataccatgtttaagatagtatattctctagttactacgatctcatcgttgtctagaatatcacatactgaatctacatccaattttagaaattggtctgtgttacatatctcttctatattattgttgatgtattgtcgtagaaaactattacgtagaccattttctttataaaacgaatatatagtactccaattatctttaccgatatatttgcacacataatccattctctcaatcactacatctttaagattttcgttgttaagatatttggctaaactatataattctattagatcatcaacagaatcagtatatatttttctagatccaaagacgaactctttggcgtcctctataatattcccagaaaagatattttcgtgttttagtttatcgagatctgatctgttcatatacgccatgattgtacggtacgttatgataaccgcataaaataaaaatccattttcatttttaaccaatactattcataattgagattgatgtaatactttgttactttgaacgtaaagacagtacacggatccgtatctccaacaagcacgtagtaatcaaatttggtgttgttaaacttcgcaatattcatcaatttagatagaaacttatactcatcatctgttttaggaatccatgtattattaccactttccaacttatcattatcccaggctatgtttcgtccatcatcgttgcgcagagtgaataattcttttgtattcggtagttcaaatatatgatccatgcatagatcggcaaagctattgtagatgtgatttttcctaaatctaatataaaactcgtttactagcaaacactttcctgatttatcgaccaagacacatatggtttctaaatctatcaagtggtggggatccatagttatgacgcagtaacatatattattacattcttgactgtcgctaatatctaaatatttattgttatcgtattggattctgcatatagatggcttgtatgtcaaagatatagaacacataaccaatttatagtcgcgctttacattctcgaatctaaagttaagagatttagaaaacattatatcctcggatgatgttatcactgtttctggagtaggatatattaaagtctttacagatttcgtccgattcaaataaatcactaaataatatcccacattatcatctgttagagtagtatcattaaatctattatattttatgaaagatatatcactgctcacctctatatttcgtacatttttaaactgtttgtataatatctctctgatacaatcagatatatctattgtgtcggtagacgataccgttacatttgaattaatggtgttccattttacaacttttaacaagttgaccaattcatttctaatagtatcaaactctccatgattaaatattttaatagtatccattttatatcactacggacacaaagtagctgacataaaccattgtataatttttatgttttatgtttattagcgtacacattttggaagttccggcttccatgtatttcctggagagcaagtagatgatgaggaaccagatagtttatatccgtacttgcacttaaagtctacattgtcgttgtatgagtatgatcttttaaacccgctagacaagtatccgtttgatattgtaggatgtggacatttaacaatctgacacgtgggtggatcggaccattctcctcctgaacacaggacaccagagttaccaatcaacgaatatccactattgcaactataagttacaacgcttccatcggtataaaaatcctcgtatccgttatgtcttccgttggatatagatggaggggattggcatttaacagattcacaaataggtgcctcgggattccataccatagatccagtagatcctaattcacaatacgatttagattcaccgatcaaatgatatccgctattacaagagtacgttatactagagccaaagtctactccaccaatatcaagttggccattatcgatatctcgaggcgatgggcatctccgtttaatacattgattaaagagtgtccatccagtacctgtacatttagcatatataggtcccattttttgctttctgtatccaggtagacatagatattctatagtgtctcctatgttgtaattagcattagcatcagtctccacactattcttaaatttcatattaatgggtcgtgacggaatagtacagcatgatagaacgcatcctattcccaacaatgtcaggaacgtcacgctctccaccttcatatttatttatccgtaaaaatgttatcctggacatcgtacaaataataaaaagcccatatatgttcgctattgtagaaattgtttttcacagttgctcaaaaacgatggcagtgacttatgagttacgttacactttggagtctcatctttagtaaacatatcataatattcgatattacgagttgacatatcgaacaaattccaagtatttgattttggataatattcgtattttgcatctgctataattaagatataatcaccgcaagaacacacgaacatctttcctacatggttaaagtacatgtacaattctatccatttgtcttccttaactatatatttgtatagataattacgagtctcgtgagtaattccagtaattacatagatgtcgccgtcgtactctacagcataaactatactatgatgtctaggcatgggagacttttttatccaacgatttttagtgaaacattccacatcgtttaatactacatatttttcatacgtggtataaactccacccattacatatatatcatcgtttacgaataccgacgcgcctgaatatctaggagtaattaagtttggaagtcttatccatttcgaagtgccgtgtttcaaatattctgccacacccgttgaaatagaaaattctaatcctcctattacatataactttccatcgttaacacaagtactaacttctgattttaacgacgacatattagtaaccgttttccattttttcgtttcaagatctacccgcgatacggaataaacatgtctattgttaatcatgccgccaataatgtatagacaattatgtaaaacatttgcattatagaattgtctatctgtattaccgactatcgtccaatattctgttctaggagagtaatgggttattgtggatatataatcagagtttttaatgactactatattatgttttataccatttcgtgtcactggctttgtagatttggatatagttaatcccaacaatgatatagcattgcgcatagtattagtcataaacttgggatgtaaaatgttgatgatatctacatcgtttggatttttatgtatccactttaataatatcatagctgtaacatcctcatgatttacgttaacgtcttcgtgggataagatagttgtcagttcatcctttgataattttccaaattctggatcggatgtcttaaggaagttcctatactttctagagaataggaacttcttacttgtacagctcgtccatgccgagagtgatcccggcggcggtcacgaactccagcaggaccatgtgatcgcgcttctcgttggggtctttgctcagggcggactgggtgctcaggtagtggttgtcgggcagcagcacggggccgtcgccgatgggggtgttctgctggtagtggtcggcgagctgcacgctgccgtcctcgatgttgtggcggatcttgaagttcaccttgatgccgttcttctgcttgtcggccatgatatagacgttgtggctgttgtagttgtactccagcttgtgccccaggatgttgccgtcctccttgaagtcgatgcccttcagctcgatgcggttcaccagggtgtcgccctcgaacttcacctcggcgcgggtcttgtagttgccgtcgtccttgaagaagatggtgcgctcctggacgtagccttcgggcatggcggacttgaagaagtcgtgctgcttcatgtggtcggggtagcggctgaagcactgcacgccgtaggtcagggtggtcacgagggtgggccagggcacgggcagcttgccggtggtgcagatgaacttcagggtcagcttgccgtaggtggcatcgccctcgccctcgccggacacgctgaacttgtggccgtttacgtcgccgtccagctcgaccaggatgggcaccaccccggtgaacagctcctcgcccttgctcaccatttttagagagaactaacacaaccagcaataaaactgaacctactttatcatttttttattcatcatcctcgaagttcctatactttctagagaataggaacttcgcggccgctcaggcctttttcagggcgtagtggtggtcgttaggcagcactcccaggcttctggcgatctgggagtagaagctagaaaagctgccgagggccaggatgcccacggtgtacatagcccaggtttccagtccgaaggtggcaggtctcagcttcaggtgatatgccactctctcgctcagttggctgtgttcgttcagacaacagctttgcaggtgggtcaggccaaaggcgctctcgttcacgccccgcacgtgcacggtctgagcggggcaatcctggtgctgggctctgaaatggtcctggcaagagatgccgtccacgtgtctgcgagtattgttgcccacctcgatcagcagtgtgttgtcggcaggatggtgggagaaggccaccacggtgttgttgcttgtctgccggcagcagtacacgtccagtgtcatcagggccatatctccttggtggtagacggcgtaggcccagccctggaacaccagtgggcacagagggccgtgagcagatgtaacagcggcggtggtcacggttgtctcggcggggctacagagcagggaccggattctcatgcacagcaggccgactgtcagaatcagggttctaggggccatcacggcgcaggtgaagccgattctggtattagagaacttgttcatcccgggtacgatacaaacttaacggatatcgcgataatgaaataatttatgattatttctcgctttcaatttaacacaaccctcaagaacctttgtatttattttcattttttaagtatagaataaagaatctataaaaactaaaaaaattatacatcataaaccaatttcctagttgtttgtaactttaagtcgacaaatctcgtaagataaagtttatacaagtgtagatgataaattctacagaggttaatatagaagcacgtaataaattgacgacgttatgactatctatatatacctttccagtatacgagtaaataactatagaagttaaactgtgaatgtcaaggtctagacaaacccttgtaactggatctttatttttcgtgtatttttgacgtaaatgtgtgcgaaagtaaggagataactttttcaatatcgtagaattgactattatattgccacctatagcatcaataattgttttgaatttcttagtcatagacaatgctaatatattcttacagtacacagtattgacaaatatcggcatttatgtttctttaaaagtcaacatctaaagaaaaatgattatcttcttgagacataactcccattttttggtattcacccacacgtttttcgaaaaaattagtttttccttccaatgatatattttccatgaaatcaaacggattggtaacattataaatttttttaaatcccaattcagaaatcaatctatccgcgacaaattctatatatgttttcatcatttcacaattcattcctataagtttaactggaagagccgcagtaagaaattcttgttcaatggatactgcatctgttataatagatctaacggtttcttcactcggtggatacaataaatgtttaaacatcaaacatgcgaagtcgcagtgcagaccctcgtctctactaattagttcgttggaaaacgtgagtccgggcattaggccacgctttttaagccaaaatatggaagcgaatgatccggaaaagaagattccttctactgcagcaaaggcaataagtctctctccataaccggcgctgtcatgtatccacttttgagcccaatcggccttcttttttacacaaggcattgtttctatggcattaaagagatagtttttttcattactatctttaacataagtatcgatcaaaagactatacatttccgaatgaatgttttcaatggccatctgaaatccgtagaaacatctagcctcggtaatctgtacttctgtacaaaatcgttccgccaaattttcattcactattccgtcactggctgcaaaaaacgccaatacatgttttataaaatatttttcgtctggtgttagtttattccaatcattgatatctttagatatatctacttcttccactgtccaaaatgatgcctctgcctttttatacatgttccagatgtcataatattggattgggaaaataacaaatctatttggatttggtgcaaggatgggttccataactaaattaacaatatcaataaattttttttcagttatctatatgcctgtacttggattttttgtacatcgatatcgccgcaatcactacaataattacaagtattattgatagcattgttattagtactatcataattaaattatcgacattcatgggtgctgaataatcgttattatcatcattatcattttgtaattgtgacatcatactagataaatcgtttgcgagattgttgtgggaagcgggcatggaggatgcattatcattattatttaacgccttccattcggattcacaaatatggcgcgcgttcaacattttatggaaactataattttgtgaaaacagataacaagaaaactcgtcatcgttcaaatttttaacgatagtaaaccgattaaacgtcgagctaatttctaacgctagcgactctgttggatatgggtttccagatatatatcttttcagttcccctacgtatctataatcatctgtaggaaatggaagatatttccatttatctactgttcctaatatcatatgtggtggtgtagtagaaccattaagcgcgaaagatgttatttcgcatcgtattttaacttcgcaataatttctggttagataacgcactctaccagtcaagtcaatgatattagcctttacagatatattcatagtagtcgtaacgatgactccatcttttagatgcgatactcctttgtatgtaccagaatcttcgtacctcaaactcgatatatttaaacaagttaatgagatattaacgcgttttatgaatgatgatatataaccagaagttttatcctcggtggctagcgctataaccttatcattataataccaactagtgtgattaatatgtgacacgtcagtgtgggtacaaatatgtacattatcgtctacgtcgtattcgatacatccgcatacagccaacaaatataaaatgacaaatactctaacgacgttcgtacccatcttgatgcggtttaataaatgttttgatttcaatttattgtaaaaaaagattcggttttatactgttcgatattctcattgcttatattttcatctatcatctccacacagtcaaatccgtggttagcatgcacctcatcaaccggtaaaagactatcggactcttctatcattataactctagaatatttaatttggtcattattaatcaagtcaattatcttatttttaacaaacgtgagtattttactcattttttataaaaacttttagaaatatacagactctatcgtgtgtctatatcttctttttatatccaatgtatttatgtctgatttttcttcatttatcatatataatggtccaaattctacacgtgcttcggattcatccagatcattaaggttcttataattgtaacatccttctcttccctcttctacatcttccttcttattcttattcttattcttattcttattcttattcttattcttattcttagcgtcacagaatctaccacagcagaatcccatgacgagcgtcatattaaactaattcattttcaattataatatacgattagtaatgaccattaaaataaaaaatattcttcataaccggcaagaaagtgaaaagttcacattgaaactatgtcagtagtatacatcatgaaatgatgatatatatatattctctattttggtggaggattatatgatataattcgtggataatcattcttaagacacatttcttcattcgtaaatcttttcacgttaaatgagtgtccatattttgcaatttcttcatatgatggcggtgtacgtggacgaggctgctcctgttcttgttgtggtcgccgactatcgtgtttgcgtttagatccctccattatcgcgattgcgtagatggagtactattttataccttgtaattaaatttttttattaattaaacgtataaaaacgttccgtatctgtatttaagagccagatttcgtctaatagaacaaatagctacagtaaaaataactagaataattgctacacccactagaaaccacggatcgtaatacggcaatcggttttcgataataggtggaacgtatattttatttaaggacttaacaattgtctgtaaaccacaatttgcttcagcggatcctgtattaactatctgtaaaagcatatgttgaccgggcggagccgaacattctccgatatctaatttctgtatatctataatattattaacctccgcatacgcattacagttcttttctagcttggataccgcactaggtacatcgtctagatctattcctatttcctcagcgatagctcttctatccttttccggaagcaatgaaatcacttcaataaatgattcaaccatgagtgtgaaactaagtctagaattactcatgcatttgttagttattcggagcgcgcaatttttaaactgtcctataacctctcctatatgaatagcacaagtgacattagtagggatagaatgttgagctaatttttgtaaataactatctataaaaagattatacaaagttttaaactctttagtttccgccatttatccagtctgagaaaatgtctctcataataaatttttccaagaaactaattgggtgaagaatggaaacctttaatctatatttatcacagtctgttttggtacacatgatgaattcttccaatgccgtactaaattcgatatctttttcgatttctggatatgtttttaataaagtatgaacaaagaaatggaaatcgtaataccagttatgtttaactttgaaattgttttttattttcttgttaatgattccagccacttgggaaaagtcaaagtcgtttaatgccgatttaatacgttcattaaaaacaaactttttatcctttagatgaattattattggttcattggaatcaaaaagtaagatattatcgggtttaagatctgcgtgtaaaaagttgtcgcagcatggtagttcgtagattttaatgtataacagagccatctgtaaaaagataaactttatgtattgtaccaaagatttaaatcctaatttgatagctaactcggtatctactttatctgccgaatacagtgctaggggaaaaattataatgtttcctctttcatattcgtagttagttctcttttcatgttcgaaaaagtgaaacatgcggttaaaatagtttataacattaatattactgttaataactgccgggtaaaagtgggatagtaatttcacgaatttgatactgtcctttctctcgttaaacgcctttagaaaaactttagaagaatatctcaatgagagttcctgaccatccatagtttgtatcaataatagcaacatatgaagaacacgtttatacagagtatgtaaaaatgttaatttatagtttaatcccatggcccacgcacacacgattaattttttttcatctccctttagattgttgtatagaaatttgggtactgtgaactccgccgtagtttccatgggactatataattttgtggcctcgaatacaaattttactacatagttatctatcttaaaaactataccatatcctcctgtagatatgtgataaaaatcgtcgtttataggataaaatcgtttatccttttgttggaaaaatgatgaattaatgtaatcattctcttctatctttagtagtgtttccctattaaaattcttaaaataatttaacaatctaactgacggagcccaattttggtgtaaatctaattgggacattatgttgttaaaatataaacagtctcctaatataacagtatctgataatctatggggagacatccattgatattcaggggatgaatcattggcaacacccatttattgtacaaaaagccccaatttacaaacgaaagtccaggtttgatagagacaaactattaactattttgtctctgtttttaacacctccacagtttttaatttctttggtaatgaaattattcacaatatcagtatcttctttatctaccagagattttactaacttgataaccttggctgtctcattcaatagggtagtaatatttgtatgtgtgatattgatatctttttgaattgtttcttttagaagtgattctttgatggtgtcagcatacgaattacaataatgcagaaactcggttaacatgcaggaattatagtaagccaattccaattgttgcctgtgttgtattagagtgtcaatatgagcaatggtgtccttgcgtttctctgatagaatgcgagcagcgattttggcgttatcatttgacgatatttctggaatgacgaatcctgtttctactaactttttggtaggacaaagtgaaacaatcaagaagatagcttctcctcctatttgtggaagaaattgaactcctctagatgatctactgacgatagtatctccttgacagatattggaccgaattacagaagtacctggaatgtaaagccctgaaaccccctcattttttaagcagattgttgccgtaaatcctgcactgtgaccaagatagagagctcctttggtgaatccatctctatgtttcagtttaaccaagaaacagtcagctggtctaaaatttccatctctatctaatacagcatctaacttgatgtcaggaactatgaccggtttaatgttatatgtaacattgagtaaatccttaagttcataatcatcactgtcatcagttatgtacgatccaaacaatgtttctaccggcatagtggatacgaagatgctatccatcagaatgtttccctgattagtattttctatatagctattcttctttaaacgattttccaaatcagtaactatgttcatttttttaggagtaggacgcctagccagtatggaagaggattttctagatcctctcttcaacatctttgatctcaatggaatgcaaaaccccatagtgaaacaaccaacgataaaaataatattgtttttcactttttataattttaccatctgactcatggattcattaatatctttataagagctactaacgtataattctttataactgaactgagatatatacaccggatctatggtttccataattgagtaaatgaatgctcggcaataactaatggcaaatgtatagaacaacgaaattatactagagttgttaaagttaatattttctatgagctgttccaataaattatttgttgtgactgcgttcaagtcataaatcatcttgatactatccagtaaaccgtttttaagttctggaatattattatcccattgtaaagcccctaattcgactatcgaatatcctgctctgatagcagtttcaatatcgacggacgtcaatactgtaataaaggtggtagtattgtcatcatcgtgataaactactggaatatggtcgttagtaggtacggtaactttacacaacgcgatatataactttccttttgtaccatttttaacgtagttgggacgtcctgcagggtattgttttgaagaaatgatatcgagaacagatttgatacgatatttgttggattcctgattatttactataatataatctagacagatagatgattcgataaatagagaaggtatatcgttggtaggataatacatccccattccagtattctcggatactctattaatgacactagttaagaacatgtcttctattctagaaaacgaaaacatcctacatggactcattaaaacttctaacgctcctgattgtgtctcgaatgcctcgtacaaggatttcaaggatgccatagattctttgaccaacgatttagaattgcgtttagcatctgatttttttattaaatcgaatggtcggctctctggtttgctaccccaatgataacaatagtcttgtaaagataaaccgcaagaaaatttatacgcatccatccaaataaccctagcaccatcggatgatattaatgtattattatagattttccatccacaattattgggccagtatactgttagcaacggtatatcgaatagattactcatgtaacctactagaatgatagttcgtgtactagtcataatatctttaatccaatctaagaaatttaaaattagattttttacactgttaaagttaacaaaggtattacccgggtacgtggatatcatatatggtattggtccattatcagtaatagctccataaactgatacggcgatggtttttatatgtgtttgatctaacgaggaagaaattcgcacccacaattcatctctagatatgtatttaatatcaaacggtaacacatcaatttcgggacgcgtatatgtttctaaatttttaatccaaatataatgatgacctatatgccctattatcatactgtcaactatagtacacctagagaacttacgatacatctgtttcctataatcgttaaattttacaaatctataacatgctaaaccttttgacgacaaccattcattaatttctgatatggaatctgtattctcgataccgtattgttctaaagccagtgctatatctccctgttcgtgggaacgctttcgtataatatcgatcaacggataatctgaagtttttggagaataatatgactcatgatctatttcgtccataaacaatctagacataggaattggaggcgatgatcttaattttgtgcaatgagtcgtcaatcctataacttctaatcttgtaatattcatcatcgacataatactatctatgttatcatcgtatattagtataccatgaccttcttcatttcgtgccaaaatgatatacagtcttaaatagttacgcaatatctcaatagtttcataattgttagctgttttcatcaagatttgtaccctgtttaacatgatggcgttctatacgtttctattttctattttttaaatttttaaatttttaacgatttactgtggctagatacccaatctctctcaaatatttttttagcctcgcttacaagctgtttatctatactattaaaactgacgaatccgtgattttggtaatgggttccgtcgaaatttgccgaagtgatatgaacatattcgtcgtcgactatcaacaattttgtattattctgaatagtgaaaaccttcacagatagatcattttgaacacacaacgcgtctagacttctggcggttgccatagaatatacgtcgttcttatcccaattaccaactagaagtctgatcttaactcctctattaatggctgcttctataatggagttgtaaatgtcgggccaatagtagctattaccgtcgacacgtgtagtgggaactatggccaaatgttcaatatctatactagtcttagctgacctgagtttatcaataactacatcggtatctagatctctagaatatcccaataggtgttccggagaatcagtaaagaacactccacctataggattcttaatatgatacgcagtgctaactggcagacaacaagccgcagagcataaattcaaccatgaattttttgcgctattaaaggctttaaaagtatcaaatcttctacgaagatctgtggccagcgggggataatcagaatatacacctaacgttttaatcgtatgtatagatcctccagtaaatgacgcgtttcctacataacatctttcatcatctgacacccaaaaacaaccgagtagtagtcccacattattttttttatctatattaacggttataaaatttatatccgggcagtgactttgtagctctcccagatttcttttccctcgttcatctagcaaaactattattttaatccctttttcagatgcctcttttagtttatcaaaaataagcgctcccctagtcgtactcagaggattacaacaaaaagatgctatgtatatatatttcttagctagagtgataatttcgttaaaacattcaaatgttgttaaatgatcggatctaaaatccatattttctggtagtgtttctaccagcctacattttgctcccgcaggtaccgatgcaaatggccacatttagttaacataaaaacttatacatcctgttctatcaacgattctagaatatcatcggctatatcgctaaaattttcatcaaagtcgacatcacaacctaactcagtcaatatattaagaagttccatgatgtcatcttcgtctatttctatatccgtatccattgtagattgttgaccgattatcgagtttaaatcattactaatactcaatccttcagaatacaatctgtatttcattgtaaatttataggcggtgtatttaagttggtagattttcaattatgtatcaatatagcaacagtagttcttgctcctccttgattctagcatcctcttcattattttcttctacgtacataaacatgtccaatacgttagacaacacaccgacgatggcggccgccacagacacgaatatgactagaccgatgaccatttaaaaacccctctctagctttcacttaaactgtatcgatcattcttttagcacatgtataatataaaaaaacattattctatttcgaatttaggcttccaaaaatttttcatccgtaaaccgataataatatatatagacttgttaatagtcggaataaatagattaatgcttaaactatcatcatctccacgattagagatacaatatttacattctttttgctgtttcgaaactttatcaatacacgttaatacaaacccaggaaggagatattgaaactgaggctgttgaaaatgaaacggtgaatacaataattcagataatgtaaaatcatgattccgtattctgatgatattagaactgctaatggatgtcgatggtatgtatctaggagtatctattttaacaaagcatcgatttgctaatatacaattatcattttgattaattgttattttattcatattcttaaaaggtttcatatttatcaattcttctacattaaaaatttccatttttaatttatgtagccccgcaatactcctcattacgtttcattttttgtctataatatccattttgttcatctcggtacatagattatccaattgagaagcgcatttagtagttttgtacattttaagtttattgacgaatcgtcgaaaactagttatagttaacattttattatttgataccctgatattaatacccctgccgttactattatttataactgatgtaacccacgtaacattggaattaactatcgatagtaatgcatcgacgcttccaaaattgtctattataaactcaccgataatttttttattacatgttttcatattcattaggattatcaaatctttaatcttactacgattgtatgcgttgatattacaagacgtcattctaaaagacggaggatttccatcaaatgccagacaatcacgtacaaagtacatggaaataggttttgttctattgcgcatcatagattcatatagaacacccgtagaaatactaatttgttttactctataaaatactaatgcatctatttcatcgttttgtataacgtctttccaagtgtcaaattccaaatttttttcattgatagtaccaaattcttctatctctttaactacttgcatagataggtaattacagtgatgcctacatgccgttttttgaaactgaatagatgcgtctagaagcgatgctacgctagtcacaatcaccactttcatatttagaatatatgtatgtaaaaatatagtagaatttcattttgtttttttctatgctataaatgaattctcattttgcatctgctcatactccgttttatatcaataccaaagaaggaagatatctggttctaaaagccgttaaagtatgcgatgttagaactgtagaatgcgaaggaagtaaagcttcctgcgtactcaaagtagataaaccctcatcacccgcgtgtgagagaagaccttcgtccccgtccagatgcgagagaatgaataaccctggaaaacaagtcccgtttatgaggacggacatgctacaaaatatgttcgcggctaatcgcgataatgtagcttctagacttttgaactaaaatacaattatatctttttcgatattaataaatccgtgtcgtccaggttttttatctctttcagtatgtgaatagataggtattttatctctattcatcatcgaatttaagagatccgataaacattgtttgtattctccagatgtcagcatctgatacaacaatatatgtgcacataaacctctggcacttatttcatgtaccttccccttatcactaaggagaatagtatttgagaaatatgtatacatgatattatcatgaattagatatacagaatttgtaacactctcgaaatcacacgatgtgtcggcgttaagatctaatatatcactcgataacacattttcatctagatacactagacattttttaaagctaaaatagtctttagtagtgacagtaactatgcgattattttcatcgatgatacatttcatcggcatattattacgcttaccatcaaagactataccatgtgtatatctaacgtattctagcatagttgccatacgtgcattaaacttttcaggatctttggatagatcttccaatctatctatttgagaaaacatttttatcatgttcaatagttgaaacgtcggatccactatatagatattatctataaagattttaggaactacgttcatggtatcctggcgaatattaaaactatcaatgatatgattatcgttttcatcttttatcaccatatagtttctaagatatgggattttacttaatataatattatttcccgtaataaattttattagaaatgccaaatctataagaaaagtcctcgaattagtttgaagaatatctatatcgccgtaccgtatatttggattaattagatatagagaatatgatccgtaacatatacaacttttattatggcgtctaagatattcttccatcaacttattaacatttttgactagggaagatacattatgacgtcccattacttttgccttgtctattattgcgacgttcatagaatttagcatatctcttgccaattcttccattgatgttacattataagaaattttagatgaaattacatttggagctttaatagtaagaactcctaatatgtccgtgtatgtggtcactaatacagattgtagttctataatcgtaaataatttacctatattatatgtttgagtctgtttagaaaagtagctaagtatacgatcttttatttctgatgcagatgtatcaacatcggaaaaaaatctttttttattcttttttactaaagatacaaatatgtctttgttaaaaacagttattttttgaatatttctagcttgtaattttaacatatgatattcattcacactaggtactctgcctaaataggtttctataatctttaatgtaatattaggaaaagtattctgatcaggattcctattcattttgaggatttaaaactctgattattgtctaatatggtctctacgcaaactttttcacagagcgatagagtttttgataactcgtttttcttaagaaatataaaactactgtctccagagctcgctctatcttttattttatttaattcgatacaaactcctgatactggttcagaaagtaattcattaattttcagtcctttatagaagatatttaatatagataatacaaaatcttcagtttttgatatcgatctgattgatcctagaactagatatattaataacgtgctcattaggcagtttatggcagcttgataattagatatagtatattccagttcatatttattagataccgcattgcccagattttgatattctatgaattcctctgaaaataaatccaaaataactaaacattctattttttgtggattagtgtactctcttccctctatcatgttcactactggtgtccacgatgataaatatctagagggaatataatatagtccataggatgccaatctagcaatgtcgaataactgtaatttgattcttcgttcttcattatgaattgattcttgaggtataaacctaacacaaattatattattagacttttcgtatgtaatgtctttcatgttataagtttttaatcctggaatagaatctattttaatgaggcttttaaacgcagagttctccaacgagtcaaagcataatactctgttgtttttcttatatacgatgttacgattttcttctttgaatggaataggtttttgaattagtttataattacaacataatagataaggaagtgtgcaaatagtacgcggaaaaaacataatagctcccctgttttcatccatggttttaagtaaatgatcactggcttctttagttaatggatattcgaacattaaccgtttcatcatcattggacagaatccatatttcttaatgtaaagagtgatcaaatcattgtgtttattgtaccatcttgttgtaaatgtgtattcggttatcggatctgctcctttttctattaaagtatcgatgtcgatctcgtctaagaattcaactatatcgacatatttcatttgtatacacataaccattactaacgtagaatgtataggaagagatgtaacgggaacagggtttgttgattcgcaaactattctaatacataattcttctgttaatacgtcttgcacgtaatctattatagatgccaagatatctatataattattttgtaagatgatgttaactatgtgatctatataagtagtgtaataattcatgtatttcgatatatgttccaactctgtctttgtgatgtctagtttcgtaatatctatagcatcctcaaaaaatatattcgcatatattcccaagtcttcagttctatcttctaaaaaatcttcaacgtatggaatataataatctattttacctcttctgatatcattaatgatatagtttttgacactatcttctgtcaattgattcttattcactatatctaagaaacggatagcgtccctaggacgaactactgccattaatatctctattatagcttctggacataattcatctattataccagaattaatgggaactattccgtatctatctaacatagttttaagaaagtcagaatctaagacctgatgttcatatattggttcatacatgaaatgatctctattgatgatagtgactatttcattctctgaaaattggtaactcattctatatatgctttccttgttgatgaaggatagaatatactcaatagaatttgtaccaacaaactgttctcttatgaatcgtatatcatcatctgaaataatcatgtaaggcatacatttaacaattagagacttgtctcctgttatcaatatactattcttgtgataatttatgtgtgaggcaaatttgtccacgttctttaattttgttatagtagatatcaaatccaatggagctacagttcttggcttaaacagatatagtttttctggaacaaattctacaacattattataaaggactttgggtagataagtgggatgaaatcctattttaattaatgctatcgcattgtcctcgtgcaaatatccaaacgcttttgtgatagtatggcattcattgtctagaaacgctctacgaatatctgtgacagatatcatctttagagaatatactagtcgcgttaatagtactacaatttgtattttttaatctatctcaataaaaaaattaatatgtatgattcaatgtataactaaactactaactgttattgataactagaatcagaatctaatgatgacgtaaccaagaagtttatctactgccaatttagctgcattatttttagcatctcgtttagattttccatctgccttatcgaatactcttccgtcgatgtctacacaggcataaaatgtaggagagttactaggcccaactgattcaatacgaaaagaccaatctctcttagttatttggcagtactcattaataatggtgacagggttagcatctttccaatcaataatttttttagccggaataacatcatcaaaagacttatgatcctctctcattgatttttcgcgggatacatcatctattatgacgtcagccatagcatcagcatccggcttatccgcctccgttgtcataaaccaacgaggaggaatatcgtcggagctgtacaccatagcactacgttgaagatcgtacagagctttattaacttctcgcttctccatattaagttgtctagttagttgtgcagcagtagctccttcgattccaatgtttttaatagccgcacacacaatctctgcgtcagaacgctcgtcaatatagatcttagacatttttagagagaactaacacaaccagcaataaaactgaacctactttatcatttttttattcatcatcctctggtggttcgtcgtttctatcgaatgtagctctgattaacccgtcatctataggtgatgctggttctggagattctggaggagatggattattatctggaagaatctctgttatttccttgttttcatgtatcgattgcgttgtaacattaagattgcgaaatgctctaaatttgggaggcttaaagtgttgtttgcaatctctacacgcgtgtctaactagtggaggttcgtcagctgctctagtttgaatcatcatcggcgtagtattcctacttttacagttaggacacggtgtattgtatttctcgtcgagaacgttaaaataatcgttgtaactcacatcctttattttatctatattgtattctactcctttcttaatgcattttataccgaataagagatagcgaaggaattctttttcggtgccgctagtacccttaatcatatcacatagtgttttatattccaaatttgtggcaatagacggtttatttctatacgatagtttgtttctggaatcctttgagtattctataccaatattattctttgattcgaatttagtttcttcgatattagattttgtattacctatattcttgatgtagtactttgatgatttttccatggcccattctattaagtcttccaagttggcatcatccacatattgtgatagtaattctcggatatcagtagcggctaccgccattgatgtttgttcattggatgagtaactactaatgtatacattttccatttataacacttatgtattaactttgttcatttatattttttcattattatgttgatattaacaaaagtgaatatatatgttaataattgtattgtggttatacggctacaatttcataatgagtggaagtcagtgtccgatgatcaatgacgatagctttactctgaaaagaaagtatcaaatcgatagtgcggagtcaacaatgaaaatggataagaagaggacaaagtttcagaatagagccaaaatggtaaaagaaataaatcagacaataagagcagcacaaactcattacgagacattgaaactaggatacataaaatttaagagaatgattaggactactactctagaagatatagcaccatctattccaaataatcagaaaacttataaactattctcggacatttcagccatcggcaaagcatcacagaatccgagtaagatggtatatgctctgctgctttacatgtttcccaatttgtttggagatgatcatagattcattcgttatagaatgcatccaatgagtaaaatcaaacacaagatcttctctcctttcaaacttaatcttattagaatattagtggaagaaagattctataataatgaatgcagatctaataaatggagaataattggaacacaagttgataaaatgttgatagctgaatctgataaatatacaatagatgcaaggtataacctaaaacccatgtatagaatcaagggaaaatctgaagaagataccctcttcatcaaacagatggtagaacaatgtgtgacatcccaggaattggtggaaaaagtgttgaagatactgtttagagatttgttcaagagtggagaatacaaagcgtacagatacgatgatgatgtagaaaatggatttattggattggatacactaaaattaaacattgttcatgatatagttgaaccatgtatgcctgttcgtaggccagtggctaagatactgtgtaaagaaatggtaaataaatactttgagaatccgctacatattattggtaaaaatcttcaagagtgcattgactttgttagtgaataggcatttcatctttctccaatactaattcaaattgttaaattaataatggatagtataaatagttattagtgataaaatagtaaaaataattattagaataagagtgtagtatcatagataactctcttctataaaaatggattttattcgtagaaagtatcttatatacacagtagaaaataatatagattttttaaaggatgatacattaagtaaagtaaacaattttaccctcaatcatgtactagctctcaagtatctagttagcaattttcctcaacacgttattactaaggatgtattagctaataccaatttttttgttttcatacatatggtacgatgttgtaaagtgtacgaagcggttttacgacacgcatttgatgcacccacgttgtacgttaaagcattgactaagaattatttatcgtttagtaacgcaatacaatcgtacaaggaaaccgtgcataaactaacacaagatgaaaaatttttagaggttgccgaatacatggacgaattaggagaacttataggcgtaaattatgacttagttcttaatccattatttcacggaggggaacccatcaaagatatggaaatcatttttttaaaactgtttaagaaaacagacttcaaagttgttaaaaaattaagtgttataagattacttatttgggcttacctaagcaagaaagatacaggcatagagtttgcggataatgatagacaagatatatacactctatttcaacaaactggtagaatcgtccatagcaatctaacagaaacgtttagagattatatctttcccggagataagactagctattgggtgtggttaaacgaaagtatagctaatgatgcggatattgttcttaatagacacgccattaccatgtatgataaaattcttagttatatatactctgagataaaacaaggacgcgttaataaaaacatgcttaagttagtttatatctttgagcctgaaaaagatatcagagaacttctgctagaaatcatatatgatattcctggagatatcctatctattattgatgcaaaaaacgacgattggaaaaaatattttattagtttttataaagctaattttattaacggtaatacatttattagtgatagaacgtttaacgaggacttattcagagttgttgttcaaatagatcccgaatatttcgataatgaacgaattatgtctttattctctacgagtgctgcggacattaaacgatttgatgagttagatattaataacagttatatatctaatataatttatgaggtgaacgatatcacattagatacaatggatgatatgaagaagtgtcaaatctttaacgaggatacgtcgtattatgttaaggaatacaatacatacctgtttttgcacgagtcggatcccatggtcatagagaacggaatactaaagaaactgtcatctataaaatccaagagtaaacggctgaacttgtttagcaaaaacattttaaaatattatttagacggacaattggctcgtctaggtcttgtgttagatgattataaaggagacttgttagttaaaatgataaaccatcttaagtctgtggaggatgtatccgcattcgttcgattttctacagataaaaaccctagtattcttccatcgctaatcaaaactattttagctagttataatatttccatcatcgtcttatttcaaaggtttttgagagataatctatatcatgtagaagaattcttggataaaagcatccatctaaccaagacggataagaaatatatacttcaattgataagacacggtagatcatagaacagaccaaatatattattaataatttggtatatacatagatattaattatcacatattaaaaattcacacatttttgataaatgggaactgctgcaacaattcagactcccaccaaattaatgaataaagaaaatgcagaaatgattttggaaaaaattgttgatcatatagttatgtatattagtgacgaatcaagtgattcagaaaataatcctgaatatattgattttcgtaacagatacgaagactatagatctctcattataaaaagtgatcacgagtttgtaaagctatgtaaaaatcatgcagagaaaagttctccagaaacgcaacaaatgattatcaaacacatatacgaacaatatcttattccagtatctgaagtactattaaaacctataatgtccatgggtgacataattacatataacggatgtaaagacaatgaatggatgctagaacaactctctaccctaaactttaacaatctccgcacatggaactcatgtagcataggcaatgtaacgcgtctgttttatacattttttagttatctgatgaaagataaactaaatatataagtataatcccattctaatactttaacctgatgtattagcatcttattagaatattaacctaactaaaagacataacataaaaactcattacatagttgataaaaagcggtaggatataaatattatggctgccaccgttccgcgttttgacgacgtgtacaaaaatgcacaaagaagaattctagatcaagaaacattttttagtagaggtctaagtagaccgttaatgaaaaacacatatctatttgataattacgcgtatggatggataccagaaactgcaatttggagtagtagatacgcaaacttagatgcaagtgactattatcccatttcgttgggattacttaaaaagttcgagtttctcatgtctctatataaaggtcctattccagtatacgaagaaaaagtaaatactgaattcatagccaatggatcgttctctggtagatacgtatcatatcttcgaaagttttctgctcttccaacaaacgagtttattagttttttattattgacctccatccctatctataatatcttattctggtttaaaaacacacagtttgatattactaaacacacattattcagatacgtctatacagataatgccaaacacctggcgttggctaggtatatgcatcaaacaggagactataagcctttgtttagtcgtctcaaagagaattatatatttaccggtcccgttccaatatgtatcaaagatatagatcaccctaatcttagtagagcaagaagtccatccgattatgagacattagctaatattagtactatattgtactttaccaagtatgatccggtattaatgtttttattgttttacgtacctgggtattcaattactacaaaaattactccagccgtagaatatctaatggataaactgaatctaacaaagagcgacgtacaactgttgtaaattattttatgcttcgtaaaatgtaggttttgaaccaaacattctttcaaagaatgagatgcataaaactttattatccaatagattgactatttcggacgtcaatcgtttaaagtaaacttcgtaaaatattctttgatcactgccgagtttaaaacttctatcgataattgtctcatatgttttaatatttacaagttttttggtccatggtacattagccggacaaatatatgcaaaataatatcgttctccaagttctatagtttctggattatttttattatattcagtaaccaaatacatattagggttatctgcggatttataatttgagtgatgcattcgactcaacataaataattctagaggagacgatctactatcaaattcggatcgtaaatctgtttctaaagaacggagaatatctatacatacctgattagaattcatccgtccttcagacaacatctcagacagtctggtcttgtatgtcttaatcatattcttatgaaacttggaaacatctcttctagtttcactagtacctttattaattctctcaggtacagattttgaattcgacgatgctgagtatttcatcgttgtatatttcttcttcgattgcataatcagattcttatataccgcctcaaactctattttaaaattattaaacaatactctattattaatcagtcgttctaactctttcgctatttctatagacttatcgacatcttgactgtctatctctgtaaacacggagtcggtatctccatacacgctacgaaaacgaaatctgtaatctataggcaacgatgttttcacaatcggattaatatctctatcgtccatataaaatggattacttaatggattggcaaaccgtaacataccgttagataactctgctccatttagtaccgattctagatacaagatcattctacgtcctatggatgtgcaactcttagccgaagcgtatgagtatagagcactatttctaaatcccatcagaccatatactgagttggctactatcttgtacgtatattgcatggaatcatagatggccttttcagttgaactggtagcctgttttaacatctttttatatctggctctctctgccaaaaatgttcttaatagtctaggaatggttccttctatcgatctatcgaaaattgctatttcagagatgaggttcggtagtctaggttcacaatgaaccgtaatatatctaggaggtggatatttctgaagcaatagctgattatttatttcttcttccaatctattggtactaacaacgacaccgactaatgtttccggagatagatttccaaagatacacacattaggatacagactgttataatcaaagattaatacattattactaaacattttttgttttggagcaaataccttaccgccttcataaggaaacttttgttttgtttctgatctaactaagatagttttagtttccaacaatagctttaacagtggacccttgatgactgtactcgctctatattcgaataccatggattgaggaagcacatatgttgacgcacccgcgtctgtttttgtttctactccataatactcccacaaatactgacacaaacaagcatcatgaatacagtatctagccatatctaaagctatgtttagattataatccttatacatctgagctaaatcaacgtcatcctttccgaaagataatttatatgtatcattaggtaaagtaggacataatagtacgactttaaatccattttcccaaatatctttacgaattactttacatataatatcctcatcaacagtcacataattacctgtggttaaaacctttgcaaatgcagcggctttgcctttcgcgtctgtagtatcgtcaccgataaacgtcatttctctaactcctctatttaatactttacccatgcaactgaacgcgttcttggatatagaatccaatttgtacgaatccaatttttcagatttttgaatgaatgaatatagatcgaaaaatatagttccattattgttattaacgtgaaacgtagtattggccatgccgcctactcccttatgactagactgatttctctcataaatacagagatgtacagcttcctttttgtccggagatctaaagataatcttctctcctgttaataactctagacgattagtaatatatctcagatcaaagttatgtccgttaaaggtaacgacgtagtcgaacgttagttccaacaattgtttagctattcgtaacaaaactatttcagaacatagaactagttctcgttcgtaatccatttccattagtgactgtatcctcaaacatcctctatcgacggcttcttgtatttcctgttccgttaacatctcttcattaatgagcgtaaacaataatcgtttaccacttaaatcgatataacagtaacttgtatgcgagattgggttaataaatacagaaggaaacttcttatcgaagtgacactctatatctagaaataagtacgatcttgggatatcgaatctaggtatttttttagcgaaacagttacgtggatcgtcacaatgataacatccattgttaatctttgtcaaatattgctcgtccaacgagtaacatccgtctggagatatcccgttagaaatataaaaccaactaatattgagaaattcatccatggtggcattttgtatgctgcgtttctttggctcttctatcaaccacatatctgcgacggagcattttctatctttaatatctagattataacttattgtctcgtcaatgtctatagttctcatctttcccaacggcctcgcattaaatggaggaggagacaatgactgatatatttcgtccgtcactacgtaataaaagtaatgaggaaatcgtataaatacggtctcaccatttcgacatctggatttcagatataaaaatctgttttcaccgtgactttcaaaccaattaatgcaccgaacatccatttatagaatttagaaatatattttcatttaaatgaatcccaaacattggggaagagccgtatggaccattatttttatagtactttcgcaagcgggtttagacggcaacatagaagcgtgtaaacgaaaactatatactatagttagcactcttccatgtcctgcatgtagacggcacgcgactattgctatagaggacaataatgtcatgtctagcgatgatctgaattatatttattattttttcatcagattatttaacaatttggcatctgatcccaaatacgcaatcgatgtgtcaaaggttaaacctttataaacttaacccattataaaacttatgattagtcacgactgaaataaccgcgtgattattttttggtataattctacacggcatggtttctgtgactatgaattcaacccccgttacattagtgaaatctttaacaaacagcaagggttcgtcaaagacataaaactcattgtttacaatcgaaatagaccccctatcacacttaaaataaaaaatatccttatcctttaccaccaaataaaattctgattggtcaatgtgaatgtattcacttaacagttccacaaatttatttattaactccgaggcacatacatcgtcggtattttttatggcaaactttactcttccagcatccgtttctaaaaaaatattaacgagttccatttatatcatccaatattattgaaatgacgttgatggacagatgatacaaataagaaggtacggtacctttgtccaccatctcctccaattcatgctctattttgtcattaactttaatgtatgaaaacagtacgccacatgcttccatgacagtgtgtaacactttggatacaaaatgtttgacattagtataattgtttaagactgtcaatctataatagatagtagctataatatattctatgatggtattgaagaagatgacaatcttggcatattgatcatttaacacagacatggtatcaacagatagcttgaatgaaagagaatcagtaattggaataagcgtcttctcgatggagtgtccgtataccaacatgtctgatattttgatgtattccattaaattatttagttttttctttttattctcgttaaacagcatttctgtcaacggaccccaacatcgttgaccgattaagttttgattgatttttccgtgtaaggcgtatctagtcagatcgtatagcctatccaataatccatcatctgtgcgtagatcacatcgtacactttttaattctctatagaagagcgacagacatctggaacaattacagacagcaatttctttattctctacagatgtaagatacttgaagacattcctatgatgatgcagaattttggataacacggtattgatggtatctgttaccataattcctttgatggctgatagtgtcagagcacaagatttccaatctttgacaatttttagcaccattatctttgttttgatatctatatcagacagcatggtgcgtctgacaacacagggattaagacggaaagatgaaatgattctctcaacatcttcaatggataccttgctattttttctggcattatctatatgtgcgagaatatcctctagagaatcagtatcctttttgatgatagtggatctcaatgacatgggacgtctaaaccttcttattctatcaccagattgcatggtgatttgtcttctttcttttatcataatgtaatctctaaattcatcggcaaattgtctatatctaaaatcataatatgagatgtttacctctacaaatatctgttcgtccaatgttagagtatctacatcagttttgtattccaaattaaacatggcaacggatttaattttatattcctctattaagtcctcgtcgataataacagaatgtagataatcatttaatccatcgtacatggttggaagatgcttgttgacaaaatctttaattgtcttgatgaaggtgggactatatctaacatcttgattaataaaatttataacattgtccataggatactttgtaactagttttatacacatctcttcatcggtaagtttagacagaatatcgtgaacaggtggtatattatattcatcagatatacgaagaacaatgtccaaatctatattgtttaatatattatatagatgtagtgtagctcctacaggaatatctttaactaagtcaatgatttcatcaaccgttagatctattttaaagttaatcatataggcattgatttttaaaaggtatgtagccttgactacattctcattaattaaccattccaagtcactgtgtgtaagaagattatattctatcataagcttgactacatttggtcccgataccattaaagaattcttatgatataaggaaacagcttttaggtactcatctactctacaagaattttggagagccttaacgatatcagtgacgtttattatttcaggaggaaaaaacctaacattgagaatgtcggagttaatagcttccagatacagtgattttggcaatagtccgtgtaatccataatccagtaacacgagctggtgcttgctagacaccttttcaatgtttaatttttttgaaataagctttgataaagccttcctcgcaaattccggatacatgaacatgtcggcgacatgattaagtattgttttttcattatttttatattttctcaacaagttctcaataccccaatagatgatagaatatcacccaatgcgtccatgttgtctatttccaacaggtcgctatatccaccaatagaagttttcccaaaaaagattctaggaacagttctaccaccagtaatttgttcaaaataatcccgcaattcattttcgggtttaaattctttaatatcgacaatttcatacgctcctcttttgaaactaaacttatttagaatatccagtgcatttctacaaaaaggacatgtatacttgacaaaaattgtcactttgttattggccaacctttgttgtacaaattcctcggccattttaatatttaagtgatataaaactatctcgacttatttaactctttagtcgagatatatggacgcagatagctatatgatagccaactacagaaggcaaacgctataaaaaacataattacgacgagcatatttataaatatttttattcagcattacttgatatagtaatattaggcacagtcaaacattcaaccactctcgatacattaactctctcattttctttaacaaattctgcaatatcttcgtaaaaagattcttgaaactttttagaatatctatcgactctagatgaaatagcgttcgtcaacatactatgttttgtatacataaaggcgcccattttaacagtttctagtgacaaaatgctagcgatcctaggatcctttagaatcacatagattgacgattcgtctctcttagtaactctagtaaaataatcatacaatctagtacgcgaaataatattatccttgacttgaggagatctaaacaatctagttttgagaacatcgataagttcatcgggaatgacatacatactatctttaatagaactcttttcatccagttgaatggattcgtccttaaccaactgattaatgagatcttctattttatcattttccagatgatatgtatgtccattaaagttaaattgtgtagcgcttctttttagtctagcagccaatactttaacatcactaatatcgatatacaaaggagatgatttatctatggtattaagaattcgtttttcgacatccgtcaaaaccaattcctttttgcctgtatcatccagttttccatcctttgtaaagaaattattttctactagactattaataagactgataaggattcctccataattgcacaatccaaactttttcacaaaactagactttacgagatctacaggaatgcgtacttcaggtttcttagcttgtgattttttcttttgcggacattttcttgtgaccaactcatctaccatttcattgattttagcagtgaaataagctttcaatgcacgggcactgatactattgaaaacgagttgatcttcaaattccgccatttaagttcaccaaacaacttttaaatacaaatatatcaatagtagtagaataagaactataaaaaaaataataattaaccaataccaaccccaacaaccggtattattagttgatgtgactgttttctcatcacttagaacagatttaacaatttctataaagtctgtcaaatcatcttccggagaccccataaatacaccaaatatagcggcgtacaacttatccatttatacattgaatattggcttttctttatcgctatcttcatcatattcatcatcaatatcaacaagtcccagattacgagccagatcttcttctacattttcagtcattgatacacgttcactatctccagagagtccgataacgttagccaccacttctctatcaatgattagtttcttgagtgcgaatgtaatttttgtttccgttccggatctatagaagacgataggtgtgataattgccttggccaattgtctttctcttttactgagtgattctagttcaccttctatagatctgagaatggatgattctccagccgaaacatattctaccatggctccgtttaatttgttgatgaagatggattcatccttaaatgttttctctgtaatagtttccaccgaaagactatgcaaagaatttggaatgcgttccttgtgcttaatgtttccatagacggcttctagaagttgatacaacataggactagccgcggtaacttttatttttagaaagtatccatcgcttctatcttgtttagatttatttttataaagtttagtctctccttccaacataataaaagtggaagtcatttgactagataaactatcagtaagttttatagagatagacgaacaattagcgtattgagaagcatttagtgtaacgtattcgatacattttgcattagatttactaatcgattttgcatactctataacacccgcacaagtctgtagagaatcgctagatgcagtaggtcttggtgaagtttcaactctcttcttgattaccttactcatgattaaacctaaataattgtactttgtaatataatgatatatattttcactttatctcatttgagaataaaaatgtttttgtttaaccactgcatgatgtacagatttcggaatcgcaaaccaccagtggttttattttatccttgtccaatgtgaattgaatgggagcggatgcgggtttcgtacgtagatagtacattcccgtttttagaccgagactccatccgtaaaaatgcatactcgttagtttggaataactcggatctgctatatggatattcatagattgactttgatcgatgaaggctcccctgtctgcagccatttttatgatcgtcttttgtggaatttcccaaatagttttataaactcgcttaatatcttctggaaggtttgtattctgaatggatccaccatctgccataatcctattcttgatctcatcattccataattttctctcggttaaaactctaaggagatgcggattaactacttgaaattctccagacaatactctccgagtgtaaatattactggtatacggttccaccgactcattatttcccaaaatttgagcagttgatgcagtcggcataggtgccaccaataaactatttctaagaccgtatgttctgattttatcttttagaggttcccaattccaaagatccgacggtacaacattccaaagatcatattgtagaataccgttactggcgtacgatcctacatatgtatcgtatggtccttccttctcagctagttcacaactcgcctctaatgcaccgtaataaatggtttcgaagatcttcttatttagatcttgtgcttccaggctatcaaatggataatttaagagaataaacgcgtccgctaatccttgaacaccaataccgataggtctatgtctcttattagagatttcagcttctggaataggataataattaatatctataattttattgagatttctgacaattactttgaccacatccttcagtttgagaaaatcaaatcgcccatctattacaaacatgttcaaggcaacagatgccagattacaaacggctacctcattagcatccgcatattgtattatctcagtgcaaagattactacacttgatagttcctaaattttgttgattactctttttgttacacgcatccttataaagaatgaatggagtaccagtttcaatctgagattctataatcgctttccagacgactcgagcctttattatagatttgtatctcctttctctttcgtatagtgtatacaatcgttcgaactcgtctccccaaacattgtccaatccaggacattcatccggacacatcaacgaccactctccgtcatccttcactcgtttcataaagagatcaggaatccaaagagctataaatagatctctggttctatgttcctcgtttcctgtattctttttaagatcgaggaacgccataatatcagaatgccacggttccaagtatatggccataactccaggccgtttgtttcctccctgatctatgtatctagcggtgttattataaactctcaacattggaataataccgtttgatataccattggtaccggagatatagcttccactggcacgaatattactaattgatagacctattccccctgccattttagagattaatgcgcatcgttttaacgtgtcatagataccctctatgctatcatcgatcatgttaagtaaaaaacagctagacatttggtgacgactagttcccgcattaaataaggtaggagaagcgtgcgtaaaccatttttcagaaagtagattgtacgtctcaatagctgagtctatatcccattgatgaattcctactgcgacacgcattaacatgtgctgaggtctttcaacgatcttgttgtttattttcaacaagtaggatttttccaaagttttaaaaccaaaatagttgtatgaaaagtctcgttcgtaaataataaccgagttgagtttatccttatatttgttaactatatccatggtgatacttgaaataatcggagaatgtttcccatttttaggattaacatagttgaataaatcctccatcacttcactaaatagtttttttgtttccttgtgtagatttgatacggctattctggcggctagaatggcataatccggatgttgtgtagtacaagtggctgctatttcggctgccagagtgtccaattctaccgttgttactccattatatattccttgaataaccttcatagctattttaataggatctatatgatccgtgtttaagccataacataattttctaatacgagacgtgattttatcaaacatgacattttccttgtatccatttcgtttaatgacaaacatttttgttggtgtaataaaaaaattatttaacttttcattaatagggatttgacgtatgtagcgtacaaaattatcgttcctggtatatagataaagagtcctatatatttgaaaatcgttacggctcgattaaactttaatgattgcatagtgaatatatcattaggatttaactccttgactatcatggcggcgccagaaattaccatcaaaagcattaatacagttatgccgatcgcagttagaacggttatagcatccaccatttatatctaaaaattagatcaaagaatatgtgacaaagtcctagttgtatactgagaattgacgaaacaatgtttcttacatatttttttcttattagtaactgacttaatagtaggaactggaaagctagacttgattattctataagtatagatacccttccagataatgttctctttgataaaagttccagaaaatgtagaattttttaaaaagttatcttttgctattaccaagattgtgtttagacgcttattattaatatgagtaatgaaatccacaccgcctctagatatcgcctttatttccacattagatggtaaatccaatagtgaaactatctttttaggaatgtatggactcgcgtttagaggagtgaacgtcttgggcgtcggaaaggatgattcgtcaaacgaataaacaatttcacaaatggatgttaatgtattagtaggaaatttcttgacgctagtggagttgaagattctaatggatgatgttctacctatttcatccgataacatgttaatttccgacaccaacggttttaatatttcgatgatatacggtagtctctctttcggacttatatagcttattccacaatacgagtcattatatactccaaaaaacaaaataactagtataaaatctgtatcgaatgggaaaaacgaaattatcgacataggtatagaatccggaacattgaacgtattaatacttaattctttttctgtggtaagtaccgataggttattgacattgtatggttttaaatattctataacttgagacttgatagatattagtgatgaattgaaaattatttttatcaccacgtgtgtttcaggatcatcgtcgacgcccgtcaaccaaccgaatggagtaaaataaatatcattaatatatgctctagatattagtatttttatcaatcctttgattatcatcttctcgtaggcgaatgattccatgatcaagagtgatttaagaacatcctccggagtattaatgggcttagtaaacagtccatcgttgcaataataaaagttatccaagttaaaggatattatgcattcgtttaaagatatcacctcatctgacggagacaattttttggtaggttttagagactttgaagctacttgtttaacaaagttattcatcgtcgtctactattctatttaattttgtagttaatttatcacatatcacattaattgactttttggtccatttttccatacgtttatattcttttaatcctgcgttatccgtttccgttatatccagtgatagatcgtgcaggttaaatagaatgctcttaaataatgtcatttttttatccgctaaaaatttaaagaatgtataaacctttttcagagatttgaaactcttaggtggtgtcctagtacacaatatcataaacaaactaataaacattccacattcagattccaacagctgattaacttccacattaatacagcctattttcgctccaaatgtacattcgaaaaatctgaataaaacatcgatgtcacaatttgtattatccaatacagaatgtctgtgattcgtgttaaaaccatcggagaaggaatagaaataaaaattattatagtggtggaattcagttggaatattgcctccggagtcataaaaggatactaaacattgttttttatcataaattacacatttccaatgagacaaataacaaaatccaaacattacaaatctagaggtagaacttttaattttgtctttaagtatatacgataagatatgtttattcataaacgcgtcaaatttttcatgaatcgctaaggagtttaagaatctcatgtcaaattgtcctatataatccacttcggatccataagcaaactgagagactaagttcttaatacttcgattgctcatccaggctcctctctcaggctctattttcatcttgacgacctttggattttcaccagtatgtattcctttacgtgataaatcatcgattttcaaatccatttgtgagaagtctatcgccttagatactttttcccgtagtcgaggtttaaaaaaatacgctaacggtatactagtaggtaactcaaagacatcatatatagaatggtaacgcgtctttaactcgtcggttaactctttcttttgatcgagttcgtcgctactattgggtctgctcaggtgccccgactctactagttccaacatcataccgataggaatacaagacactttgccggcggttgtagatttatcatatttctccactacatatccgttacaatttgttaaaaatttagatacatctatattgctacataatccagctagtgaatatatatgacataataaattggtaaatcctagttctggtattttactaattactaaatctgtatatctttccatttatcatggaaaagaatttaccagatatcttcttttttccaaactgcgttaatgtattctcttacaaatattcacaagatgaattcagtaatatgagtaaaacggaacgtgatagtttctcattggccgtgtttccagttataaaacatagatggcataacgcacacgttgtaaaacataaaggaatatacaaagttagtacagaagcacgtggaaaaaaagtatctcctccatcactaggaaaacccgcacacataaacctaaccacgaaacaatatatatacagtgaacacacaataagctttgaatgttatagttttctaaaatgtataacaaatacagaaatcaattcgttcgatgagtatatattaagaggactattagaagctggtaatagtttacagatattttccaattccgtaggtaaacgaacagatactataggtgtactagggaataagtatccatttagcaaaattccattggcctcattaactcctaaagcacaacgagagatattttcagcgtggatttctcatagacctgtagttttaactggaggaactggagtgggtaagacgtcacaggtacccaagttattgctttggtttaattatttatttggtggattctctactctagataaaatcactgactttcacgaaagaccagtcattctatctcttcctaggatagctttagttagattgcatagcaataccattttaaaatcattgggatttaaggtactagatggatctcctatttctttacggtacggatctataccggaagaattaataaacaaacaaccaaaaaaatatggaattgtattttctacccataagttatctctaacaaaactatttagttatggcactcttattatagacgaagttcatgagcatgatcaaataggagatattattatagcagtagcgagaaagcatcatacgaaaatagattctatgtttttaatgactgccacgttagaggatgacagggaacggctaaaagtatttttacctaatcccgcatttatacatattcctggagatacactgtttaaaattagcgaggtatttattcataataagataaatccatcttccagaatggcatacatagaagaagaaaagagaaatttagttactgctatacagatgtatactcctcctgatggatcatccggtatagtctttgtggcatccgttgcacagtgtcacgaatataaatcatatttagaaaaaagattaccgtatgatatgtatattattcatggtaaggtcttagatatagacgaaatattagaaaaagtgtattcatcacctaatgtatcgataattatttctactccttatttggaatccagcgttactatacgcaatgttacacacatttatgatatgggtagagtttttgtccccgctccttttggaggatcgcaagaatttatttctaaatctatgagagatcaacgaaaaggaagagtaggaagagttaatcctgggacatacgtatatttctatgatctgtcttatatgaagtctatacagcgaatagattcagaatttctacataattatatattgtacgctaataagtttaatctaacactccccgaagatttgtttataatccctacaaatttggatattctatggcgtacaaaggaatatatagactcgttcgatattagtacagaaacatggaataaattattatccaattattatatgaagatgatagagtatgctaaactttatgtactaagtcctattctcgctgaggagttggataactttgagaggacgggagaattaactagtattgtacgagaagccattttatctctaaatttacgaattaagattttaaattttaaacataaagatgatgatacgtatatacacttttgtaaaatattattcggtgtctataacggaacaaacgctactatatattatcatagacctctaacgggatatatgaatatgatttcagatactatatttgttcctgtagataataactaaaaatcaaactctaatgaccacatctttttttagagatgaaaaattttccacatctccttttgtagacacgactaaacattttgcagaaaaaagtttattagtgtttagataatcgtatacttcatcagtgtagatagtaaatgtgaacagataaaaggtattcttgctcaatagattggtaaattccatagaatatattaatcctttcttcttgagatcccacatcatttcaaccagagacgttttatccaatgatttacctcgtactataccacatacaaaactagattttgcagtgacgtcgtacctggtattcctaccaaacaaaattttacttttagttcttttagaaaattctaaggtagaatctctatttgccaatatgtcatctatggaattaccactagcaaaaaatgatagaaatatatattgatacatcgcagctggttttgatctactatactttaaaaacgaatcagattccataattgcctgtatatcatcagctgaaaaactatgttttacacgtattccttcggcatttctttttaatgatatatcttgtttagacaatgataaagttatcatgtccatgagagacgcgtctccgtatcgtataaatatttcattagatgttagacgcttcattaggggtatacttctataaggtttcttaatcagtccatcattggttgcgtcaagaactactatcggatgttgttgggtatctctagtgttacacatggccttactaaagtttgggtaaataactatgatatctctattaattatagatgcatatatttcattcgtcaaggatattagtatcgacttgctatcgtcattaatacgtgtaatgtaatcatataaatcatgcgatagccaaggaaaattcaaatagatgttcatcatataatcgtcgctataattcatattaatactttgacattgactaatttgtaatatagcctcgccacgaagaaagctctcgtattcagtttcatcgataaaggataccgttaaatataactggttgccgatagtctcatagtctattaagtggtaagtttcgtacaaatacagaatccctaaaatattatctaatgttggattaatctttaccataactgtataaaatggagacggagtcataactattttaccgtttgtacttactggaatagatgaaggaataatctccggacatgctggtaaagacccaaatgtctgtttgaagaaatccaatgttccaggtcctaatctcttaacaaaaattacgatattcgatcccgatatcctttgcattctatttaccagcatatcacgaactatattaagattatctatcatgtctattctcccaccgttatataaatcgcctccgctaagaaacgttagtatatccatacaatggaatacttcatttctaaaatagtattcgttttctaattctttaatgtgaaatcgtatactagaaagggaaaaattatctttgagttttccgttagaaaagaaccacgaaactaatgttctgattgcgtccgattccgttgctgaattaatggatttacaccaaaaactcatataacttctagatgtagaagcattcgctaaaaaattagtagaatcaaaggatataagtagatgttccaacaagtgagcaattcccaagatttcatctatatcattctcgaatccgaaattagaaattcccaagtagatatcctttttcatccgatcattgatgaaaatacgaactttattcggtaagacaatcatttactaaggagtaaaataggaagtaatgttcgtatgtcgttatcatcgtataaattaaaggtgtgttttttaccattaagtgacattataattttaccaatattggaattataatataggtgtatttgcgcactcgcgacggttgatgcatcggtaaatatagctgtatctaatgttctagtcggtatttcatcatttcgctgtctaataatagcgttttctctatctgtttccattacagctgcctgaagtttattggtcggataatatgtaaaataataagaaatacatacgaataacaaaaataaaataagatataataaagatgccatttagagatctaattttgttcaacttgtccaaattcctacttacagaagatgaggaatcgttggagatagtgtcttccttatgtagaggatttgaaatatcttatgatgacttgataacttactttccagataggaaataccataaatatatttctaaagtatttgaacatgtagatttatcggaggaattaagtatggaattccatgatacaactttgcgagatttagtttatcttagattgtacaagtattccaagtgtatacggccgtgttataaattaggagataatctaaaaggcatagttgttataaaggacaggaatatttatattagggaagcaaatgatgacttgatagaatatctcctcaaggaatacactcctcagatttatacatattctaatgagcgcgtccccataactggttcaaaattaattctttgtggattttctcaagttacatttatggcgtatacaacgtcgcatataacaacaaataaaaaggtagatgttctcgtttccaaaaaatgtatagatgaactagtcgatccaataaattatcaaatacttcaaaatttatttgataaaggaagcggaacaataaacaaaatactcaggaagatattttattcggtaacaggtggccaaactccataggtagctttttctatttcggattttagaatttccaaattcaccagcgatttatcggttttggtgaaatccaaggatttattaatgtccacaaatgccatttgttttgtctgtggattgtatttgaaaatggaaacgatgtagttagatagatgcgctgcgaagtttcctattagggttccgcgcttcacgtcacccagcatacttgaatcaccatcctttaaaaaaaatgataagatatcaacatggagtatatcatactcggattttaattcttctactgcatcactgacattttcacaaatactacaatacggtttaccgaaaataatcagtacgttcttcatttatgggtatcaaaaacttaaaatcgttactgctggaaaataaatcactgacgatattagatgataatttatacaaagtatacaatggaatatttgtggatacaatgagtatttatatagccgtcgccaattgtgtcagaaacttagaagagttaactacggtattcataaaatacgtaaacggatgggtaaaaaagggagggcatgtaaccctttttatcgatagaggaagtataaaaattaaacaagacgttagagacaagagacgtaaatattctaaattaaccaaggacagaaaaatgctagaattagaaaagtgtacatccgaaatacaaaatgttaccggatttatggaagaagaaataaaggcagaaatgcaattaaaaatcgataaactcacatttcaaatatatttatctgattctgataacataaaaatatcattgaatgagatactaacacatttcaacaataatgagaatgttacattattttattgtgatgaacgagacgcagaattcgttatgtgtctcgaggctaaaacacatttctctaccacaggagaatggccgttgataataagtaccgatcaggatactatgctatttgcatctactgataatcatcctaagatgataaaaaacttaactcaactgtttaaatttgttccctcggcagaggataactatttagcaaaattaacggcgttagtgaatggatgtgatttctttcctggactctatggggcatctataacacccaacaacttaaacaaaatacaattgtttagtgattttacaatcgataatatagtcactagtttggcaattaaaaattattatagaaagactaactctaccgtagacgtgcgtaatattgttacgtttataaacgattacgctaatttagacgatgtctactcgtatgttcctccttgtcaatgcactgttcaagaatttatattttccgcattagatgaaaaatggaacaattttaaatcatcttatttagagaccgttccgttaccctgtcaattaatgtacgcgttagaaccacgcaaggagattgatgtttcagaagttaaaactttatcatcttatatagatttcgaaaatactaaatcagatatcgatgttataaaatctatatcctcgatcttcggatattctaacgaaaactgtaacacgatagtattcggcatctataaggataatttactactgagtataaataattcattttactttaacgatagtctgttaataaccaatactaaaagtgataatataataaatataggttactagattaaaaatggtgttccaactcgtgtgctctacatgcggtaaagatatttctcacgaacgatataaattgattatacgaaaaaaatcattaaaggatgtactcgtcagtgtaaagaacgaatgttgtaggttaaaattatctacacaaatagaacctcaacgtaacttaacagtgcaacctctattggatataaactaatatggatccggttaattttatcaagacatatgcgcctagaggttctattatttttattaattataccatgtcattaacaagtcatttgaatccatcgatagaaaaacatgtgggtatttattatggtacgttattatcggaacacttggtagttgaatctacctatagaaaaggagttcgaatagtcccattggatagtttttttgaaggatatcttagtgcaaaagtatacatgttagagaatattcaagttatgaaaatagcagctgatacgtcattaactttattgggtattccgtatggatttggtcataatagaatgtattgttttaaattggtagctgactgttataaaaatgccggtgttgaaacatcgtctaaacgaatattaggtaaagatatttttctgagccaaaacttcacagacgataatagatggataaagatatatgattctaataatttaacattttggcaaattgattaccttaaagggtgagttaatatgcataactactcctccgttgttttttccctcgttctttttcttaacgttgtttgccatcactctcataatgtaaagatattctaaaatggtaaacttttgcatatcggacgcagaaattggtataaatgttgtaattgtattatttcccgtcaatggactagtcacagctccatcagttttatatcctttagagtatttctcactcgtgtctagcattctagagcattccatgatctgtttatcgttgatattggccggaaagatagattttttattttttattatattactattggcaattgtagatataacttctggtaaatatttttctaccttttcaatttcttctattttcaagccggctatatattctgctatattgttgctagtatcaataccttttctggctaagaagtcatatgtggtattcactatatcagttttaactggtagttccattagcctttccacttctgcagaataatcagaaattggttctttaccagaaaatccagctactataataggctcaccgatgatcattggcaaaatcctatattgtaccagattaatgagagcatatttcatttccaataattctgctagttcttgagacattgatttatttgatgaatctagttggttctctagatactctaccatttctgccgcatacaataacttgttagataaaatcagggttatcaaagtgtttagcgtggctagaatagtgggcttgcatgtattaaagaatgcggtagtatgagtaaaccgttttaacgaattatatagtctccagaaatctgtggcgttacatacatgagccgaatgacatcgaagattgtccaatatttttaatagctgctctttgtccattatttctatatttgactcgcaacaattgtagataccattaatcactgattcctttttcgatgccggacaatagcacaattgtttagctttggactctatgtattcagaattaatagatatatctcttaatacagattgcactatacattttgaaactatgtcaaaaattgtagaacgacgctgttctgcagccatttaactttaaataatttacaaaaatttaaaatgagcatccgtataaaaatcgataaactgcgccaaattgtggcatatttttcagagttcagtgaagaagtgtctataaatgtagactcgacggatgagttaatgtatatttttgccgccttgggcggatctgtaaacatttgggccattatacctctcagtgcatcagtgttctaccgaggagccgaaaacattgtgtttaatcttcctgtgtccaaggtaaaatcgtgtttgtgtagttttcacaatgatgccatcatagatatagaacctgatctggaaaataatctagtaaaactttctagttatcatgtagtaagtgtcgattgtaataaggaactgatgcctattaggacagatactactatttgtctaagtatagatcaaaagaaatcttatgtgtttaattttcacaagtatgaagaaaaatgttgtggtagaaccgtcattcatttagaatggttgttgggctttatcaagtgtattagtcagcatcagcatctggctattatgtttaaagatgacaatattattatgaagactcctggtaatactgatgcattttccagggaatattctatgactgaatgttctcaagaactacaaaagttttctttcaaaatagctatctcgtctctcaacaaactacgaggattcaaaaagagagtcaatgtttttgaaactagaatcgtaatggataatgacgataacattctaggaatgttgttttcggatagagttcaatcctttaagatcaacatctttatggcgtttttagattaatactttcaatgagataaatatgggtggcggagtaagtgttgagctccctaaacgggatccgcctccgggagtacccactgatgagatgttattaaacgtggataaaatgcatgacgtgatagctcccgctaagcttttagaatatgtgcatataggaccactagcaaaagataaagaggataaagtaaagaaaagatatccagagtttagattagtcaacacaggacccggtggtctttcggcattgttaagacaatcgtataatggaaccgcacccaattgctgtcgcacttttaatcgtactcattattggaaaaaggatggaaagatatcagataagtatgaagagggtgcagtattagaatcgtgttggccagacgttcacgacactggaaaatgcgatgttgatttattcgactggtgtcagggggatacgttcgatagaaacatatgccatcagtggatcggttcagcctttaataggagtaatagaactgtagagggtcaacaatcgttaataaatctgtataataagatgcaaacattatgtagtaaagatgctagtgtaccaatatgtgaatcatttttgcatcatttacgcgcacacaatacagaagatagcaaagagatgatcgattatattctaagacaacagtctgcggactttaaacagaaatatatgagatgtagttatcccactagagataagttagaagagtcattaaaatatgcggaacctcgagaatgttgggatccagagtgttcgaatgccaatgttaatttcttgctaacacgtaattataataatttaggactttgcaatattgtacgatgtaatactagcgtgaacaacttacagatggataaaacttcctcattaagattgtcatgtggattaagcaatagtgatagattttctactgttcccgtcaatagagcaaaagtagttcaacataatattaaacactcgttcgacctaaaattgcatttgatcagtttattatctctcttggtaatatggatactaattgtagctatttaaatgggtgccgcagcaagcatacagacgacggtgaatacactcagcgaacgtatctcgtctaaattagaacaagaagcgaatgctagtgctcaaacaaaatgtgatatagaaatcggaaatttttatatccgacaaaaccatggatgtaacctcactgttaaaaatatgtgctctgcggacgcggatgctcagttggatgctgtgttatcagccgctacagaaacatatagtggattaacaccggaacaaaaagcatacgtgccagctatgtttactgctgcgttaaacattcagacgagtgtaaacactgttgttagagattttgaaaattatgtaaaacaaacttgtaattctagcgcggtcgtcgataacaaattaaagatacaaaacgtaatcatagatgaatgttacggagccccaggatctccaacaaatttggaatttattaatacaggatctagcaaaggaaattgtgccattaaggcgttgatgcaattgactactaaggccactactcaaatagcacctagacaagttgctggtacaggagttcagttttatatgattgttatcggtgttataatattggcagcgttgtttatgtactatgccaagcgtatgctgttcacatccaccaatgataaaatcaaacttattttagccaataaggaaaacgtccattggactacttacatggacacattctttagaacttctccgatggttattgctaccacggatatgcaaaactgaaaatatattgataatattttaatagattaacatggaagttatcgctgatcgtctagacgatatagtgaaacaaaatatagcggatgaaaaatttgtagattttgttatacacggtctagagcatcaatgtcctgctatacttcgaccattaattaggttgtttattgatatactattatttgttatagtaatttatatttttacggtacgtctagtaagtagaaattatcaaatgttgttggcgttggtggcgctagtcatcacattaactattttttattactttatactataatagtactagactgacttctaacaaacatctcacctgccataaataaatgcttgatattaaagtcttctatttctaacactattccatctgtggaaaataatactctgacattatcgctaattgacacatcggtgagtgatatgcctataaagtaataatcttctttgggcacatataccagtgtaccaggttctaacaacctatttactggtgctcctgtagcatactttttctttaccttgagaatatccatcgtttgcttggtcaatagcgatatgtgattttttatcaaccactcgaaaaagtaattggagtgttcatatcctctacgggctattgtctcatggccgtgtatgaaatttaagtaacacgactgtggtagatttgttctatagagccggttgccgcaaatagatagaactaccaatatgtctgtacaaatgttaaacattaattgattaacagaaaaaacaatgttcgttctgggaatagaaaccagatcaaaacaaaattcgttagaatatatgccacgtttatacattgaatataaaataactacagtttgaaaaataacagtatcatttaaacatttaacttgcggggttaatttcacaactttactgtttttaaactgttcaaaatatagcatcgatccatgagaaatacgtttagccgcctttaatagaggaaatcccaccgcctttctggatctcaccaacgacgatagttctgaccagcaactcatttcttcatcatccacctgttttaacatataataggcaggagatagatatccgtcattgcaatattccttttcgtaggcacacaatctaatattgataaaatctccattctcttctctgcatttattatcttgtttcggtggctgattaggctgtagtcttggtttaggccttggtctatcgttgttgaatctattttggtcattaaatctttcatttcttcctggtatatttctatcacctcgtttggttggatttttgtctatattatcgtttgtaacatcggtacgggtattcatttatcacaaaaaaaacttctctaaatgagtctactgctagaaaacctcatcgaagaagataccatattttttgcaggaagtatatctgagtatgatgatttacaaatggttattgccggcgcaaaatccaaatttccaagatctatgctttctatttttaatatagtacctagaacgatgtcaaaatatgagttggagttgattcataacgaaaatatcacaggagcaatgtttaccacaatgtataatataagaaacaatttgggtctaggagatgataaactaactattgaagccattgaaaactatttcttggatcctaacaatgaagttatgcctcttattattaataatacggatatgactgccgtcattcctaaaaaaagtggtaggagaaagaataagaacatggttatcttccgtcaaggatcatcacctatcttgtgcattttcgaaactcgtaaaaagattaatatttataaagaaaatatggaatccgcatcgactgagtatacacctatcggagacaacaaggctttgatatctaaatatgcgggaattaatgtcctgaatgtgtattctccttccacatccatgagattgaatgccatttacggattcaccaataaaaataaactagagaaacttagtactaataaggaactagaatcgtatagttctagccctcttcaagaacccattaggttaaatgattttctgggactattggaatgtgttaaaaagaatattcctctaacagatattccgacaaaggattgattactataaatggagaatgttcctaatgtatactttaatcctgtgtttatagagcccacgtttaaacattctttattaagtgtttataaacacagattaatagttttatttgaagtattcgttgtattcattctaatatatgtattttttagatctgaattaaatatgttcttcatgcctaaacgaaaaatacccgatcctattgatagattacgacgtgctaatctagcgtgtgaagacgataaattaatgatctatggattaccatggatgacaactcaaacatctgcgttatcaataaatagtaaaccgatagtgtataaagattgtgcaaagcttttgcgatcaataaatggatcacaaccagtatctcttaacgatgttcttcgcagatgatgattcattttttaagtatttggctagtcaagatgatgaatcttcattatctgatatattgcaaatcactcaatatctagactttctgttattattattgatccaatcaaaaaataaattagaagccgtgggtcattgttatgaatctctttcagaggaatacagacaattgacaaaattcacagactctcaagattttaaaaaactgtttaacaaggtccctattgttacagatggaagggtcaaacttaataaaggatatttgttcgactttgtgattagtttgatgcgattcaaaaaagaatcctctctagctaccaccgcaatagatcctattagatacatagatcctcgtcgcgatatcgcattttctaacgtgatggatatattaaagtcgaataaagtgaacaataattaattctttattgtcatcatgaacggcggacatattcagttgataatcggccccatgttttcaggtaaaagtacagaattaattagacgagttagacgttatcaaatagctcaatataaatgcgtgactataaaatattctaacgataatagatacggaacgggactatggacgcatgataagaataattttgaagcattggaagcaactaaactatgtgatgtcttggaatcaattacagatttctccgtgataggtatcgatgaaggacagttctttccagacattgttgaattctgtgagcgtatggcaaacgaaggaaaaatagttatagtagccgcactcgatgggacatttcaacgtaaaccgtttaataatattttgaatcttattccattatctgaaatggtggtaaaactaactgctgtgtgtatgaaatgctttaaggaggcttccttttctaaacgattgggtgaggaaaccgagatagaaataataggaggtaatgatatgtatcaatcggtgtgtagaaagtgttacatcgactcataatattatattttttatctaaaaaactaaaaataaacattgattaaattttaatataatacttaaaaatggatgttgtgtcgttagataaaccgtttatgtattttgaggaaattgataatgagttagattacgaaccagaaagtgcaaatgaggtcgcaaaaaaactgccgtatcaaggacagttaaaactattactaggagaattattttttcttagtaagttacagcgacacggtatattagatggtgccaccgtagtgtatataggatcggctcctggtacacatatacgttatttgagagatcatttctataatttaggaatgattatcaaatggatgctaattgacggacgccatcatgatcctattctaaatggattgcgtgatgtgactctagtgactcggttcgttgatgaggaatatctacgatccatcaaaaaacaactgcatccttctaagattattttaatttctgatgtaagatccaaacgaggaggaaatgaacctagtacggcggatttactaagtaattacgctctacaaaatgtcatgattagtattttaaaccccgtggcatctagtcttaaatggagatgcccgtttccagatcaatggatcaaggacttttatatcccacacggtaataaaatgttacaaccttttgctccttcatattcagctgaaatgagattattaagtatttataccggtgagaacatgagactgactcgagttaccaaatcagacgctgtaaattatgaaaaaaagatgtactaccttaataagatcgtccgtaacaaagtagttgttaactttgattatcctaatcaggaatatgactattttcacatgtactttatgctgaggaccgtgtactgcaataaaacatttcctactactaaagcaaaggtactatttctacaacaatctatatttcgtttcttaaatattccaacaacatcaactgaaaaagttagtcatgaaccaatacaacgtaaaatatctagcaaaaattctatgtctaaaaacagaaatagcaagagatccgtacgcggtaataaatagaaacgtactactgagatatactaccgatatagagtataatgatttagttactttaataaccgttagacataaaattgattctatgaaaactgtgtttcaggtatttaacgaatcatccataaattatactccggttgatgatgattatggagaaccaatcattataacatcgtatcttcaaaaaggtcataacaagtttcctgtaaattttctatacatagatgtggtaatatctgacttatttcctagctttgttagactagatactacagaaactaatatagttaatagtgtactacaaacaggcgatggtaaaaagactcttcgtcttcccaaaatgttagagacggaaatagttgtcaagattctctatcgccctaatataccattaaaaattgttagatttttccgcaataacatggtaactggagtagagatagccgatagatctgttatttcagtcgctgattaatcaattagtagagatgagataagaacattataataatcaataatatatcttatatcttatatcttatatcttgtttagaaaaatgctaatattaaaatagctaacgctagtaatccaatcggaagccatttgatatctataatagggtatctaatttcctgatttaaatagcggacagctatattctcggtagctactcgtttggaatcacaaacattatttacatctaatttactatctgtaatggaaacgtttcccaatgaaatggtacaatccgatacattgcattttgttatatttttttttaaagaggctggtaacaacgcatcgcttcgtttacatggctcgtaccaacaataatagggtaatcttgtatctattcctatccgtactatgcttttatcaggataaatacatttacatcgtatatcgtctttgttagcatcacagaatgcataaatttgttcgtccgtcatgataaaaatttaaagtgtaaatataactattatttttatagttgtaataaaaagggaaatttgattgtatactttcggttctttaaaagaaactgacttgataaaaatggctgtaatctctaaggttacgtatagtctatatgatcaaaaagagattaatgctacagatattatcattagtcatgttaaaaatgacgacgatatcggtaccgttaaagatggtagactaggtgctatggatggggcattatgtaagacttgtgggaaaacggaattggaatgtttcggtcactggggtaaagtaagtatttataaaactcatatagttaagcctgaatttatttcagaaattattcgtttactgaatcatatatgtattcactgcggattattgcgttcacgagaaccgtattccgacgatattaacctaaaagagttatcgggacacgctcttaggagattaaaggataaaatattatccaagaaaaagtcatgttggaacagcgaatgtatgcaaccgtatcaaaaaattactttttcaaagaaaaaggtttgtttcgtcaacaagttggatgatattaacgttcctaattctctcatctatcaaaagttaatttctattcatgaaaagttttggccattattagaaattcatcaatatccagctaacttattttatacagactactttcccatccctccgctgattattagaccggctattagtttttggatagatagtatacccaaagagaccaatgaattaacttacttattaggtatgatcgttaagaattgtaacttgaatgctgatgaacaggttatccagaaggcggtaatagaatacgatgatattaaaattatttctaataacacttccagtatcaatttatcatatattacatccggcaaaaataatatgattagaagttatattgtcgcccgacgaaaagatcagaccgctagatctgtaattggtcccagtacatctatcaccgttaatgaggtaggaatgcccgcatatattagaaatacacttacagaaaagatatttgttaatgcctttacagtggataaagttaaacaactattagcgtcaaaccaagttaaattttactttaataaacgattaaaccaattaacaagaatacgccaaggaaagtttattaaaaataaaatacatttattgcctggtgattgggtagaagtagctgttcaagaatatacaagtattatttttggaagacagccgtctctacatagatacaacgtcatcgcttcatctatcagagctaccgaaggagatactatcaaaatatctcccggaattgccaactctcaaaatgctgatttcgacggagatgaagaatggatgatattggagcaaaatcctaaagccgtaattgaacaaagtattcttatgtatccgacgacgttactcaaacacgatattcatggagcccccgtttatggatctattcaagatgaaatcgtagcagcgtattcattgtttagaatacaagatctttgtttagatgaagtattgaacatcttggggaaatatggaagaaagttcgatcctaaaggtaaatgtaaattcagcggtaaagatatctatacttacttgataggtgaaaagattaattatccgggtctcttaaaggatggtgaaattattgcaaacgacgtagatagtaattttgttgtggctatgaggcatctgtcattggctggactcttatccgatcataagtcgaacgtggaaggtatcaactttattatcaagtcatcttatgtttttaagagatatctatctatttacggttttggggtgacattcaaagatctgagaccaaattcgacgttcactaataaattggaggccatcaacgtagaaaaaatagaacttatcaaagaagcatacgccaaatatctcaacgatgtaagagacgggaaaatagttccattatctaaagctttagaggcggactatgtggaatccatgttatccaacttgacaaatcttaatatccgagagatagaagaacatatgagacaaacgctgatagatgatccagataataacctcctgaaaatggccaaagcgggttataaagtaaatcccacagaactaatgtatattctaggtacttatggacaacagaggattgatggtgaaccagcagagactcgagtattgggtagagtcttaccttactatcttccagactctaaggatccagaaggaagaggttatattcttaattctttaacaaaaggattaacaggttctcaatattacttttcgatgctggttgccagatctcaatctactgatatcgtctgtgaaacatcacgtaccggaacactggctagaaaaatcattaaaaagatggaggatatggtggtcgacggatacggacaagtagttataggtaatacgctcatcaagtacgccgccaattataccaaaattctaggctcagtatgtaaacctgtagatcttatctatccagatgagtccatgacttggtatttggaaattagtgctctgtggaataaaataaaacagggattcgtttactctcagaaacagaaacttgcaaaaaagacattggcgccgtttaatttcctagtattcgtcaaacccaccactgaggataatgctattaaggttaaggatctgtacgatatgattcataacgtcattgatgatgtgagagagaaatacttctttacggtatctaatatagattttatggagtatatattcttgacgcatcttaatccttctagaattagaattacaaaagaaacggctatcactatctttgaaaagttctatgaaaaactcaattatactctaggtggtggaactcctattggaattatttctgcacaggtattgtctgagaagtttacacaacaagccctgtccagttttcacactactgaaaaaagtggtgccgtcaaacaaaaacttggtttcaacgagtttaataacctgactaatttgagtaagaataagaccgaaattatcactctggtatccgatgatatctctaaacttcaatctgttaagattaatttcgaatttgtatgtttgggagaattaaatccaaacatcactcttcgaaaagaaacagataggtatgtagtagatataatagtcaatagattatacatcaagagagcagaaattaccgaattagtcgtcgaatatatgattgaacgatttatctcctttagcgtcattgtaaaggaatggggtatggagacattcattgaggacgaggataatattagatttactgtctacctaaatttcgttgaaccggaagaattgaatcttagtaagtttatgatggttcttccgggtgccgccaacaagggcaagattagtaaattcaagattcctatctctgactatacgggatatgacgacttcaatcaaacaaaaaagctcaataagatgactgtagaactcatgaatctaaaagaattgggttctttcgatttggaaaacgtcaacgtgtatcctggagtatggaatacatacgatatcttcggtatcgaggccgctcgtgaatacttgtgcgaagccatgttaaacacctatggagaagggttcgattatctgtatcagccttgtgatcttctcgctagtttactatgtgctagttacgaaccagaatcagtgaataaattcaagttcggcgcagctagtactcttaagagagctacgttcggagacaataaagcattgttaaacgcggctcttcataaaaagtcagaacctattaacgataatagtagctgccacttttttagcaaggtccctaatataggaactggatattacaaatactttatcgacttgggtcttctcatgagaatggaaaggaaactatctgataagatatcttctcaaaagatcaaggaaatggaagaaacagaagacttttaattcttatcaataacatatttttctatgatctgtcttttaaacgatggattttccacaaatgcgcctctcaagtccctcatagaatgatacacgtataaaaaatatagcataggcgatgactccttatttttagacattagatatgccaaaatcatagccccgcttctatttactcccgcagcacaatgaaccaacacgggctcgtttcgttgatcacatttagataaaaaggcggtcacgtcgtcaaaatatttactaatatcggtagttgtatcatctaccaacggtatatgaataatattaatattagagttaggcaatgtatatttatccatcgtcaaatttaaaacatatttgaacttaacttcagatgatggtgcatccatagcatttttataatttcccaaatacacattattggttacccttgtcattatagtgggagatttggctttgtgcatatctccagttgaacgtagtagtaagtatttatacaaacttttcttatccatttataacgtacaaatggataaaactactttatcggtaaacgcgtgtaatttagaatacgttagagaaaaggctatagtaggcgtacaagcagccaaaacatcaacacttatattctttgttattatattggcaattagtgcgctattactctggtttcagacgtctgataatccagtctttaatgaattaacgagatatatgcgaattaaaaatacggttaacgattggaaatcattaacggatagcaaaacaaaattagaaagtgatagaggtaaacttctagccgctggtaaggatgatatattcgaattcaaatgtgtggatttcggcgcctattttatagctatgcgattggataagaaaacatatctgccgcaagctattaggcgaggtactggagacgcgtggatggttaaaaaggcggcaaaggtcgatccatctgctcaacaattttgtcagtatttgataaaacacaagtctaataatgttattacttgtggtaatgagatgttaaatgaattaggttatagcggttattttatgtcaccgcattggtgttccgattttagtaatatggaatagtgttagataaatgcggtaacaaatgttcctgtaaggaaccataacagcttagatttaacgttaaagatgagcataaacataataaacaaaattacaatcaaacctataacattaatatcaaacaatccaaaaaatgaaatcagtggagtagtaaacgcgtacataactcctggataacgtttagcagctgccgttcctattctagaccaaaaattcggtttcatgttttcgaagcggtgttctgcaacaagtcggggatcgtgttctacatatttggcggcattatccagtatctgcctattgatcttcatttcgttttcgattctggctatttcaaaataaaatcccgatgatagacctccagactttataatttcatctacgatgttcagcgccgtagtaactctaataatataggctgataagctaacatcataccctcctgtatatgtgaatatggtatgatttttgtccattacaagctcggttttaactttattgcctgtaataatttctctcatctgtaggatatctatttttttgtcatgcattgccttcaagacgggacgaagaaacgtaatatcctcaataacgttatcgttttctacaataactacatattctacctttttattttctaactcggtaaaaaaattagaatcccatagggctaaatgtctagcgatatttcttttcgtttcctctgtacacatagtgttacaaaaccctgaaaagaagtgagtatacttgtcatcatttctaatgtttcctccagtccactgtataaacgcataatccttgtaatgatctggatcatccttgactaccacaacatttcttttttctggcataacttcgttgtcctttacatcatcgaacttctgatcattaatatgctcatgaacattaggaaatgtttctgatggaggtctatcaataactggcacaacaataacaggagttttcaccgccgccatttagttattgaaattaatcatatacaactctttaatacgagttatattttcgtctatccattgtttcacatttacatatttcgacaaaaagatataaaatgcgtattccaatgcttctctgtttaatgaattactaaaatatacaaacacgtcactgtctggcaataaatgatatcttagaatattgtaacaatttattttgtattgcacatgttcgtgatctatgagttcttcttcgaatggcataggatctccgaatctgaaaacgtataaataggagttagaataataatatttgagagtattggtaatatataaactctttagcggtataattagtttttttctctcaatttctatttttagatgtgatggaaaaatgactaattttgtagcattagtatcatgaactctaatcaaaatcttaatatcttcgtcacacgttagctctttgaagtttttaagagatgcatcagttggttctacagatggagtaggtgcaacaattttttgttctacacatgtatgtactggagccattgttttaactataatggtgcttgtatcgaaaaactttaatgcagatagcggaagctcttcgccgcgactttctacatcgtaattgggttctaacgccgatctctgaatggatactagttttctaagttctaatgtgattctctgaaaatgtaaatccaattcctccggcattatagatgtgtatacatcggtaaataaaactatagtatccaacgatcccttctcgcaaattctagtcttaaccaaaaaatcgtatataaccacggagatggcgtatttaagagtggattcttctaccgttttgttcttggatgtcatataggaaactataaagtccgcactactgttaagaatgattactaacgcaactatatagttcaaattaagcattttggaaacataaaataactctgtagacgatacttgactttcgaataagtttgcagacaaacgaagaaagaacagacctctcttaatttcagaagaaaactttttttcgtattcctgacgtctagagtttatatcaataagaaagttaagaattagtcggttaatgttgtatttcattacccaagtttgagatttcataatattatcaaaagacatgataatattaaagataaagcgctgactatgaacgaaatagctatatggttcgctcaaaaatatagtcttgttaaacgtggaaacgataactgtatttttaatcacgtcagcggcatctaaattaaatataggtatatttattccacacactctacaatatgccacaccatcttcataataaataaattcgttagcaaaattattaattttagtgaaatagttagcgtcaactttcatagcttccttcaatctaatttgatgctcacacggtgcgaattctactctaacatcccttttccatgcctcaggttcatcgatctctataatatctagttttttgcgtttcacaaacacaggctcgtctctcgcgatgagatctgtatagtaactatgtaaatgataactagatagaaagatgtagctatatagatgacgatcctttaagagaggtataataactttaccccaatcagatagactgttgttatggtcttcggaaaaagaatttttataaatttttccagtattttccaaatatacgtacttaacatctaaaaaatccttaatgataataggaatggataatccgtctattttataaagaaatacatatcgcacattatacttttttttggaaatgggaataccgatgtgtctacataaatatgcaaagtctaaatattttttagagaatcttagttggtccaaattcttttccaagtacggtaatagatttttcatattgaacggtatcttcttaatctctggttctagttccgcattaaatgatgaaactaagtcactatttttataactaacgattacatcacctctaacatcatcatttaccagaatactgatcttcttttgtcgtaaatacatgtctaatgtgttaaaaaaaagatcatacaagttatacgtcatttcatctgtggtattcttgtcattgaaggataaactcgtactaatctcttctttaacagcctgttcaaatttatatcctatatacgaaaaaatagcaaccagtgtttgatcatccgcgtcaatattctgttctatcgtagtgtataacaatcgtatatcttcttctgtgatagtcgatacgttataaaggttgataacgaaaatatttttatttcgtgaaataaagtcatcgtaggattttggacttatattcgcgtctagtagatatgcttttatttttggaatgatctcaattagaatagtctctttagagtccatttaaagttacaaacaactaggaaattggtttatgatgtataatttttttagtttttatagattctttattctatacttaaaaaatgaaaataaatacaaaggttcttgagggttgtgttaaattgaaagcgagaaataatcataaattatttcattatcgcgatatccgttaagtttgtatcgtaatggcgtggtcaattacaaataaagcggatactagtagcttcacaaagatggctgaaatcagagctcatctaaaaaatagcgctgaaaataaagataaaaacgaggatattttcccggaagatgtaataattccatctactaagcccaaaaccaaacgagccactactcctcgtaaaccagcggctactaaaagatcaaccaaaaaggaggaagtggaagaagaagtagttatagaggaatatcatcaaacaactgaaaaaaattctccatctcctggagtcggcgacattgtagaaagcgtggctgctgtagagctcgatgatagcgacggggatgatgaacctatggtacaagttgaagctggtaaagtaaatcatagtgctagaagcgatctttctgacctaaaggtggctaccgacaatatcgttaaagatcttaagaaaattattactagaatctctgcagtatcgacggttctagaggatgttcaagcagctggtatctctagacaatttacttctatgactaaagctattacaacactatctgatctagtcaccgagggaaaatctaaagttgttcgtaaaaaagttaaaacttgtaagaagtaaatgcgtgcacttttttataaagatggtaaactctttaccgataataattttttaaatcctgtatcagacgataatccagcgtatgaggttttgcaacatgttaaaattcctactcatttaacagatgtagtagtatatgaacaaacgtgggaagaggcattaactagattaatttttgtgggaagcgattcaaaaggacgtagacaatacttttacggaaaaatgcatgtacagaatcgcaacgctaaaagagatcgtatttttgttagagtatataacgttatgaaacgaattaattgttttataaacaaaaatataaagaaatcgtccacagattccaattatcagttggcggtttttatgttaatggaaactatgttttttattagatttggtaaaatgaaatatcttaaggagaatgaaacagtagggttattaacactaaaaaataaacacatagaaataagtcccgatgaaatagttatcaagtttgtaggaaaggacaaagtttcacatgaatttgttgttcataagtctaatagactatataaaccgctattgaaactgacggatgattctagtcccgaagaatttctgttcaacaaactaagtgaacgaaaggtatacgaatgtatcaaacagtttggtattagaatcaaggatctccgaacgtatggagtcaattatacgtttttatataatttttggacaaatgtaaagtccatatctcctcttccgtcaccaaaaaagttaatagcgttaactatcaaacaaactgctgaagtggtaggtcatactccatcaatttcaaaaagagcttacatggcaacgactattttagaaatggtaaaggataaaaattttttagatgtagtatctaaaactacgttcgatgaattcctatctatagtcgtagatcacgttaaatcatctacggatggatgatatagatctttacacaaataattacaagaccgataaatggaaatggataagcgtataaaatctctcgcaatgacagctttcttcggagagctaaacacattagatattatggcattgataatgtctatatttaaacgccatccaaacaataccattttttcagtggataaggatggtcagtttatgattgatttcgaatacgataattataaggcttctcaatatttggatctgaccctcactccgatatctggagatgaatgcaagactcacgcatcgagtatagccgaacaattggcgtgtgcggatattattaaagaggatattagcgaatatatcaaaactactccccgtcttaaacgatttataaaaaaataccgcaatagatcagatactcgcatcagtcgagatacagaaaagcttaaaatagctctagctaaaggcatagattacgaatatataaaagacgcttgttaataagtaaatgaaaaaaaactagtcgtttataataaaacacgatatggatgccaacgtagtatcatcttctactattgcaacgtatatagacgctttagcgaagaatgcttcagaattagaacagaggtctaccgcatacgaaataaataatgaattggaactagtatttattaagccgccattaattactttgacaaatgtagtgaatatctctacgattcaggaatcgtttattcgatttaccgttactaataaggaaggtgttaaaattagaactaagattccattatctaaggtacatggtctagatgtaaaaaatgtacagttagtagatgctatagataacatagtttgggaaaagaaatcattagtgacggaaaatcgtcttcacaaagaatgcttgttgagactatcgacagaggaacgtcatatatttttggattacaagaaatatggatcctctatccgactagaattagtcaatcttattcaagcaaaaacaaaaaactttacgatagactttaagctaaaatattttctaggatccggtgcccagtctaaaagttctttattacacgctattaatcatccaaagtcaaggcctaatacatctctggaaatagaattcacacctagagacaatgaaaaagttccatatgatgaactaataaaggaattgacgactctatcacgtcatatatttatggcttctccagagaatgtaattctttctccgcctattaacgcacctataaagacttttatgttgcctaaacaagatatagtaggtctggatctggaaaatctatacgctgtaactaagactgacggcattcctataactatcagagttacatcaaacgggttgtattgttattttacacatcttggttatattattagatatcctgttaagagaataatagattccgaagtagtagtctttggtgaggcagttaaggataagaactggaccgtatatctcattaagctaatagagcctgtgaatgcaatcaatgatagactagaagaaagtaagtatgttgaatctaaactagtggatatttgtgatcggatagtattcaagtcaaagaaatacgaaggtccgtttactacaactagtgaagtcgtcgatatgttatctacatatttaccaaagcaaccagaaggtgttattctgttctattcaaagggacctaaatctaacattgattttaaaattaaaaaggaaaatactatagaccaaactgcaaatgtagtatttaggtacatgtccagtgaaccaattatctttggagaatcgtctatctttgtagagtataagaaatttagcaacgataaaggctttcctaaagaatatggttctggtaagattgtgttatataacggcgttaattatctaaataatatctattgtttggaatatattaatacacataatgaagtgggtattaagtccgtggttgtacctattaagtttatagcagaattcttagttaatggagaaatacttaaacctagaatcgataaaaccatgaaatatattaactcagaagattattatggaaatcaacataatatcatagtcgaacatttaagagatcaaagcatcaaaataggagatatctttaacgaggataaactatcggatgtgggacatcaatacgccaataatgataaatttagattaaatccagaagttagttattttacgaataaacgaactagaggaccgttgggaattttatcaaactacgtcaagactcttcttatttctatgtattgttccaaaacatttttagacgattccaacaaacgaaaggtattggcgattgattttggaaacggtgctgacctggaaaaatacttttatggagagattgcgttattggtagcgacggatccggatgctgatgctatagctagaggaaatgaaagatacaacaaattaaactctggaattaaaaccaagtactacaaatttgactacattcaggaaactattcgatccgatacatttgtctctagtgtcagagaagtattctattttggaaagtttaatatcatcgactggcagtttgctatccattattcttttcatccgagacattatgctaccgtcatgaataacttatccgaactaactgcttctggaggcaaggtattaatcactaccatggacggagacaaattatcaaaattaacagataaaaagacttttataattcataagaatttacctagtagcgaaaactatatgtctgtagaaaaaatagctgatgatagaatagtggtatataatccatcaacaatgtctactccaatgactgaatacattatcaaaaagaacgatatagtcagagtgtttaacgaatacggatttgttcttgtagataacgttgatttcgctacaattatagaacgaagtaaaaagtttattaatggcgcatctacaatggaagatagaccgtctacaaaaaactttttcgaactaaatagaggagccattaaatgtgaaggtttagatgtcgaagacttacttagttactatgttgtttatgtcttttctaagcggtaaataataatatggtatgggttctgatatccccgttctaaatgcattaaataattccaatagagcgatttttgttcctataggaccttccaactgtggatactctgtattgttaatagatatattaatacttttgtcgggtaacagaggttctacgtcttctaaaaataaaagtttgataacatctggcctgttcataaataaaaacttggcgattctatatatactcttattatcaaatctagccattgtcttatagatgtgagctactgtaggtgtaccatttgattttctttctaatactatatatttctctcgaagaagttcttgcacatcatctgggaataaaatactactgttgagtaaatcagttattttttttatatcgatattgatggacatttttatagttaaggataataagtatcccaaagtcgataacgacgataacgaagtatttatacttttaggaaatcacaatgactttatcagattaaaattaacaaaattaaaggagcatgtatttttttctgaatatattgtgactccagatacatatggatctttatgcgtcgaattaaatgggtctagttttcagcacggtggtagatatatagaggtggaggaatttatagatgctggaagacaagttagatggtgttctacatccaatcatatatctgaagatatacccgaagatatacacactgataaatttgtcatttatgatatatacacttttgacgctttcaagaataaacgattggtattcgtacaggtacctccgtcgttaggagatgatagtcatttgactaatccgttattgtctccgtattatcgtaattcagtagccagacaaatggtcaatgatatgatttttaatcaagattcatttttaaaatatttattagaacatctgattagaagccactatagagtttctaaacatataacaatagttagatacaaggataccgaagaattaaatctaacgagaatatgttataatagagataagtttaaggcgtttgtattcgcttggtttaacggcgtttcggaaaatgaaaaggtactagatacgtataaaaaggtatctaatttgatataatgaattcagtgactgtatcacacgcgccatatactattacttatcacgatgattgggaaccagttatgagtcaattggtagagttttataacgaagtagccagttggctgctacgagacgagacgtcgcctattcctgataagttctttatacagttgaaacaaccgcttagaaataaacgagtatgtgtgtgtggtatagatccgtatccgaaagatggaactggtgtaccgttcgaatcaccaaattttacaaaaaaatcaattaaggagatagcttcatctatatctagattaaccggagtaattgattataaaggttataaccttaatataatagacggggttataccctggaattattacttaagttgtaaattaggagaaacaaaaagtcacgcgatctactgggataagatttccaagttactgctgcagcatataactaaacacgttagtgttctttattgtttgggtaaaacagatttctcgaatatacgggcaaagttagaatccccggtaactaccatagtgggatatcatccagcggctagagaccgccaattcgagaaagatagatcatttgaaattatcaacgttttactggaattagacaacaaggtacctataaattgggctcaagggtttatttattaatgctttagtgaaattttaacttgtgttctaaatggatgcggctattagaggtaatgatgttatctttgtccttaagactataggtgtcccatcagcatgtagacaaaatgaagatccaagattcgtagaagcatttaaatgcgacgagttaaaaagatatattgataataatccagaatgtacactattcgaaagtcttagggatgaggaagcatactctatagtcagaattttcatggatgtagatttagacgcgtgtctagacgaaatagattatttaacggctattcaagattttattatcgaggtgtcaaactgtgtagctagattcgcgtttacagaatgcggtgccattcatgaaaatgtaataaaatccatgagatctaatttttcattgactaagtctacaaatagagataaaacaagttttcatattatctttttagacacgtataccactatggatacattgatagctatgaaacgaacactattagaattaagtagatcatctgaaaatccactaacaagatcgatagacactgccgtatataggagaaaaacaactcttcgggttgtaggtactaggaaaaatccaaattgcgacactattcatgtaatgcaaccaccgcatgataatatagaagattacctattcacttacgtggatatgaacaacaatagttattacttttctctacaacgacgattggaggatttagttcctgataagttatgggaaccagggtttatttcattcgaagacgctataaaaagagtttcaaaaatattcattaattctataataaactttaatgatctcgatgaaaataattttacaacggtaccactggtcatagattacgtaacaccttgtgcattatgtaaaaaacgatcgcataaacatccgcatcaactatcgttggaaaatggtgctattagaatttacaaaactggtaatccacatagttgtaaagttaaaattgttccgttggatggtaataaactgtttaatattgcacaaagaattttagacactaactctgttttattaaccgaacgaggagactatatagtttggattaataattcatggaaatttaacagcgaagaacccttgataacaaaactaattctgtcaataagacatcaactacctaaggaatattcaagcgaattactctgtccgaggaaacgaaagactgtagaagctaacatacgagacatgttagtagattcagtagagaccgatacctatccggataaacttccgtttaaaaatggtgtattggacctggtagacggaatgttttactctggagatgatgctaaaaaatatacgtgtactgtatcaaccggatttaaatttgacgatacaaagttcgtcgaagacagtccagaaatggaagagttaatgaatatcattaacgatatccaaccattaacggatgaaaataagaaaaatagagagctatatgaaaaaacattatctagttgtttatgtggtgctaccaaaggatgtttaacattcttttttggagaaactgcaactggaaagtcgacaaccaaacgtttgttaaagtctgctatcggtgacctgtttgttgagacgggtcaaacaattttaacagatgtattggataaaggacctaatccatttatcgctaacatgcatttgaaaagatctgtattctgtagcgaactacctgattttgcctgtagtggatcaaagaaaattagatctgataatattaaaaagttgacagaaccttgtgtcattggaagaccgtgtttctccaataaaattaataatagaaaccatgctacaatcattatcgatactaattacaaacctgtctttgataggatagataacgcattaatgagaagaattgccgtcgtgcgattcagaacacacttttctcaaccttctggtagagaggctgctgaaaataatgacgcgtacgataaagtcaaactattagacgaggggttagatggtaaaatacaaaataatagatatagatttgcatttctatacttgttggtgaaatggtacaaaaaatatcatgttcctattatgaaactatatcctacacccgaagagattcctgactttgcattctatctcaaaataggtactctgttagtatctagctctgtaaagcatattccattaatgacggacctctccaaaaagggatatatattgtacgataatgtggttactcttccgttgactactttccaacagaaaatatccaagtattttaattctagactatttggacacgatatagagagcttcatcaatagacataagaaatttgccaatgttagtgatgaatatctgcaatatatattcatagaggatatttcatctccgtaaatatatgctcatatatttatagaagatatcacatatctaaatgaataccggaattatagatttatttgataatcatgttgatagtataccaactatattacctcatcagttagctactctagattatctagttagaactatcatagatgagaacagaagcgtgttattgttccatattatgggatcaggtaaaacaataatcgctttgttgttcgccttggtagcttccagatttaaaaaggtttacattctagtgccgaacatcaacatcttaaaaattttcaattataatatgggtgtagctatgaacttgtttaatgacgaattcatagctgagaatatctttattcattccacaacaagtttttattctcttaattataacgataacgtcattaattataacggattatctcgctacaataactctatttttatcgttgatgaggcacataatatctttgggaataatactggagaacttatgaccgtgataaaaaataaaaacaagattccttttctactattgtctggatctcccattactaacacacctaatactctgggtcatattatagatttaatgtccgaagagacgatagattttggtgaaattattagtcgtggtaagaaagtaattcagacacttcttaacgaacgaggtgtgaatgtacttaaggatttgcttaaaggaagaatatcatattacgaaatgcctgataaagatctaccaacgataagatatcacggacgtaagtttctagatactagagtagtatattgtcacatgtctaaacttcaagagagagattatatgattactagacgacagctatgttatcatgaaatgtttgataaaaatatgtataacgtgtcaatggcagtattgggacaacttaatctgatgaataatttagatactttatttcaggaacaggataaggaattgtacccaaatctgaaaataaataatggcgtgttatacggagaagaattggtaacgttaaacattagttccaaatttaagtactttatcaatcggatacagacactcaacggaaaacattttatatacttttctaattctacatatggtggattggtaattaaatatatcatgctcagtaatggatattctgaatataatggttctcagggaactaatccacatatgataaacggcaaaccaaaaacatttgctatcgttactagtaaaatgaaatcgtctttagaggatctattagatgtgtataattctcctgaaaacgatgatggtagtcaattgatgtttttgttttcatcaaacattatgtccgaatcctatactctgaaagaggtaaggcatatttggtttatgactatcccagatactttttctcaatacaaccaaattcttggacgatctattagaaaattctcttacgccgatatttctgaaccagttaatgtatatcttttagccgccgtatattccgatttcaatgacgaagtaacgtcattaaacgattacacacaggatgaattaattaatgttttaccatttgacatcaaaaagctgttgtatctaaaatttaagacgaaagaaacgaatagaatatactctattcttcaagagatgtctgaaacgtattctcttccaccacatccatcaattgtaaaagttttattgggagaattggtcagacaatttttttataataattctcgtattaagtataacgactccaagttacttaaaatggttacatcagttataaaaaataaagaagacgctaggaattacatagatgatattgtaaacggtcacttctttgtatcgaataaagtatttgataaatctcttttatacaaatacgaaaacgatattattacagtaccgtttagactttcctacgaaccatttgtttggggagttaactttcgtaaagaatataacgtggtatcttctccataaaactgatgagatatataaagaaataaatgtcgagctttgttaccaatggatacctttccgttacattggaacctcatgagctgacgttagacataaaaactaatattaggaatgccgtatataagacgtatctccatagagaaattagtggtaaaatggccaagaaaatagaaattcgtgaagacgtggaattacctctcggcgaaatagttaataattctgtagttataaacgttccgtgtgtaataacctacgcgtattatcacgttggggatatagtcagaggaacattaaacatcgaagatgaatcaaatgtaactattcaatgtggagatttaatctgtaaactaagtagagattcgggtactgtatcatttagcgattcaaagtactgcttttttcgaaatggtaatgcgtatgacaatggcagcgaagtcactgccgttctaatggaggctcaacaaggtatcgaatctagttttgtttttctcgcgaatatcgtcgactcataagaaagagaatagcggtaagtataaacacgaatactatggcaataattgcgaatgttttattcccttcgatatatttttgataatatgaaaaacatgtctctctcaaatcggacaaccatctcataaaatagttctcgcgcgctggagaggtagttgctgctcgtataatctccccagaataatatacttgcgtgtcgtcgttcaatttatacggatttctatagttctctgttatataatacggttttccatcatgattagacgacgacaatagtgttctaaatttagatagttgatcagaatgaatgtttattggcgttggaaaaattatccatacagcgtctgcagagtgcttgatagttgttcctagatatgtaaaataatccaacgtactaggtagcaaattgtctagataaaatactgaatcaaacggcgcagacgtattagcggatctaatggaatccaattgattgactatcttttgaaaatatacatttttatgatccgatacttgtaagaatatagaaataatgataagtccatcatcgtgtttttttgcctcttcataagaactatattttttcttattccaatgaacaagattaatctctccagagtatttgtacacatctatcaagtgattggatccataatcgtcttcctttccccaatatatatgtagtgatgataacacatattcattggggagaaaccctccacttatatatcctcctttaaaattaatccttactagttttccagtgttctggatagtggttggtttcgactcattataatgtatgtctaacggcttcaatcgcgcgttagaaattgcttttttagtttctatattaataggagatagttgttgcggcatagtaaaaatgaaatgataactgtttaaaaatagctcttagtatgggaattacaatggatgaggaagtgatatttgaaactcctagagaattaatatctattaaacgaataaaagatattccaagatcaaaagacacgcatgtgtttgctgcgtgtataacaagtgacggatatccgttaataggagctagaagaacttcattcgcgttccaggcgatattatctcaacaaaattcagattctatctttagagtatccactaaactattacggtttatgtactacaatgaactaagagaaatctttagacggttgagaaaaggttctatcaacaatatcgatcctcacttcgaagagttaatattattgggtggtaaactagataaaaaggaatctattaaagattgtttaagaagagaattaaaagaggaaagtgatgaacgtataacagtaaaagaatttggaaatgtaattctaaaacttacaacacgggataaattatttaataaagtatatataagttattgcatggcgtgttttattaatcaatcgttggaggatttatcgcatactagtatttacaatgtagaaattagaaagattaaatcattaaatgattgtattaacgacgataaatacgaatatctgtcttatatttataatatgctagttaatagtaaatgaacttttacagatctagtataattagtcagattattaagtataatagacgactagctaagtctattatttgcgaggatgactctcaaattattacactcacggcattcgttaaccaatgcctatggtgtcataaacgagtatccgtgtccgctattttattaactactgataacaaaatattagtatgtaacagacgagatagttttctctattctgaaataattagaactagaaacatgtttagaaagaaacgattatttctgaattattccaattatttgtccaaacaggaaagaagtatactatcgtcatttttttctctatatccagctactgctgataatgatagaatagatgctatttatccgggtggcatacccaaaaggggtgagaatgttccagagtgtttatccagggaaattaaagaagaagttaatatagacaattcttttgtattcatagacactcggttttttattcatggcatcatagaagataccattattaataaattttttgaggtaatcttctttgtcggaagaatatctctaacgagtgatcaaatcattgatacatttaaaagtaatcatgaaatcaaggatctaatatttttagatccgaattcaggtaatggactccaatacgaaattgcaaaatatgctctagatactgcaaaactcaaatgttatggccatagaggatgttattacgaatcattaaaaaaattaactgaggatgattgattagaaaatataaattaatttaccatcgtgtatttttataacgggattgtccggcatatcatgtagatagttaccgtctacatcgtatactcgaccatctacgcctttaaatcctctatttattgacattaatctattagaattggaataccaaatattagtaccctcaattagtttattggtaatattttttttagacgatagatcgatggctcttgaaaccaaggttttccaaccggactcattgtcgatcggtgagaagtctttttcattagcatgaatccattctaatgatgtatgtttaaacactctaaacaattggacaaattcttttgatttgctttgaatgatttcaaataggtcttcgtctacagtaggcataccattagataatctagccattataaagtgcacgtttacatatctacgttctggaggagtaagaacgtgactattgagacgaatggctcttcctactatctgacgaagagacgcctcgttccaagtcatatctagaatgaagatatcattgattgagaagaagctaataccctcgcctccactagaagagaatacgcatgttttaatgcattctccgttagtgtttgattcttggttaaactcagccaccgccttgattctagtatcttttgttctagatgagaactctatattagagataccaaagactttgaaatatagtaataagatttctattcctgactgattaacaaatggttcaaagactagacatttaccatgggatgctaatattcccaaacatacatctataaatttgacgcttttctcttttaattcagtaaatagagagatatcagccgcactagcatcccctttcaatagttctccctttttaaaggtatctaatgcggatttagaaaactctctatttcttaatgaatttttaaaatcattatatagtgttgctatctcttgcgcgtattcgcccggatcacgattttgtctttcaggaaagctatcgaacgtaaacgtagtagccatacgtctcagaattctaaatgatgatatacctgtttttatttcagcgagtttagccttttgataaatttcttcttgctttttcgacatattaacgtatcgcattaatactgttttcttagcgaatgatgcagacccttctacgtcatcaaaaatagaaaactcgttattaactatgtacgaacataggcctcctagtttggagactaattctttctcatcaactagacgtttattctcaaatagcgattggtgttgtaaggatcctggtcgtagtaagttaaccaacatggtgaattcttgcacactattgacgataggtgtagccgataaacaaatcatcttatggttttttaacgcaatggttttagataaaaaattatatactgaacgagtaggacggatcttaccatcttctttgattaatgatttagaaatgaagttatgacattcatcaataatgacgcatattctactcttggaattaatagttttgatattagtaaaaaatttatttctaaaattttgatcatcgtaattaataaaaatacaatccttcgttatctctggagcgtatctgagtatagtgttcatccaaggatcttctatcaaagcctttttcaccaataagataatagcccaattcgtataaatatccttaagatgtttgagaatatatacagtagtcattgttttaccgacacccgtttcatggaacaataaaagagaatgcatactgtctaatcctaagaaaactcttgctacaaaatgttgataatccttgaggcgtactacgtccgaccccatcatttcaacaggcatattagtagttctgcgcaatgcataatcgatataggccgcgtgtgatttactcatttatgagtgataagtaataactatgttttaaaaatcacagcagtagtttaactagtcttctctgatgtttgttttcgatacttttcgaatcagaagtcatactagaataaagcagcgagtgaacgtaatagagagcttcgtatactctattcgaaaactctaagaacttattaatgaattccgtatccactggatcgtttaaaatactaaattgaacactgttcacatccttccaagaagaagacttagtgacggacttaacatgagacataaataaatccaaattttttttacaaacatcactagccaccataatggcgctatctttcaaccagctatcgcttacgcattttagcagtctaacatttttaaagagactacaatatattctcatagtatcgattacacctctaccgaataaagttggaagtttaataatacaatatttttcgtttacaaaatcaaataatggtcgaaacacgtcgaaggttaacatcttataatcgctaatgtatagattgttttcagtgagatgattattagatttaatagcatctcgttcacgtttgaacagtttattgcgtgcgctgaggtcggcaactacggcgtccgctttagtactcctcccataatactttacgctattaatctttaaaatttcatagactttatctagatcgctttctggtaacatgatatcatgtgtaaaaagttttaacatgtcggtcggcattctatttagatcattaactctagaaatctgaagaaagtaattagctccgtattccagactaggtaatgggcttttacctagagacagattaagttctggcaatgtttcataaaatggaagaaggacatgcgttccctcccggatattttttacaatttcatccatttacaactctatagtttgttttcattattattagttattatctcccataatcttggtaatacttaccccttgatcgtaagataccttatacaggtcattacatacaactaccaattgtttttgtacataatagattggatggttgacatccatggtggaataaactactcgaacagatagtttatctttccccctagatacattggccgtaatagttgtcggcctaaagaatatctttggtgtaaagttaaaagttagggttcttgttccattattgctttttgtcagtagttcattataaattctcgagatgggtccgttctctgaatatagaacatcatttccaaatctaacttctagtctagaaataatatcggtcttattcttaaaatctattcccttgatgaagggatcgttaatgaacaaatccttggcctttgattcggctgatctattatctccgttatagacgttacgttgactagtccaaagacttacaggaatagatgtatcgatgatgttgatactatgtgatatgtgagcaaagattgttctcttagtggcatcactatatgttccagtaatggcggaaaactttttagaaatgttatatataaaagaattttttcgtgttccaaacattagcagattagtatgaagataaacactcatattatcaggaacattatcaatttttacatacacatcagcatcttgaatagaaacgataccatcttctggaacctctacgatctcggcagactccggataaccagtcggtgggccatcactaacaataactagatcatccaacaatctactcacatatgcatctatataatctttttcatcttgtgagtaccctggatacgaaataaatttattatccgtatttccataataaggtttagtataaacagagagcgatgttgccgcatgaacttcagttacagtcgccgttggttggtttatttgacctattactctcctaggtttctctataaacgatggtttaatttgtacattcttaaccatatatccaataaagctcaattcaggaacataaacaaattctttgttgaacgtttcaaagtcgaacgaagagtcacgaataacgatatcggatactggattgaaggttaccgttacggtaatttttgaatcggatagtttaagactgctgaatgtatcttccacatcaaacggagttttaatataaacgtatactgtagatggttctttaatagtgtcattaggagttaggccaatagaaatatcattaagttcactagaatatccagagtgtttcaaagcaattgtattattgatacaattattatataattcttcgccctcaatttcccaaataacaccgttacacgaagagatagatacgtgattaatacatttatatccaacatatggtacgtaaccgaatcttcccatacctttaacttctggaagttccaaactcagaaccaaatgattaagcgcagtaatatactgatccctaatttcgaagctagcgatagcctgattgtctggaccatcgtttgtcataactccggatagagaaatatattgcggcatatataaagttggaatttgactatcgactgcgaagacattagaccgtttaatagagtcatccccaccgatcaaagaattaatgatagtattattcattttctatttaaaatggaaaaagcttacaataaactccgtagagaaatatctataatttgtgagttttccttaaagtaacagcttccgtaaacgccgtctttatctcttagtaagtttattgtatttataaccttttccttatcttcatagaatactaaaggcaacaaagaaatttttggttcttctctaagagctacgtgagacttaaccatagaagccaacgaatccctacatattttagaacagaaataccctacttcaccacccttgtatgtctcaatactaataggtctaaaaaccaaatcttgattacaaaaccaacacttatcaattacactatttgtcttaatagacacatctgccatagatttataatactttggtagtatacaagcgagtgcttcttctttagcgggcttaaagactgctttaggtgctgaaataaccacatctggaaggcttactcgcttagccatttaattacggaactatttttttatacttctaatgagcaagtagaaaacctctcatctacaaaaacgtactcgtgtccataatcctctaccatagtaacacgttttttagatctcatatgtgctaaaaagttttcccatactaattggttactattatttttcgtataatttttaacagtttgaggttttagatttttagttacagaagtgatatcgaatattttatccaaaaagaatgagtaattaattgtcttagaaggagtgttttcttggcaaaagaataccaagtgcttaaatatttctactacttcattaatcttttctgtactcagattcagtttctcatcttttacttgattgattatttcaaagactaacttataatcctttttatttattctctcgttagccttaagaaaactagatacaaaatttgcatctacatcatccgtggatatttgatttttttccatgatatccaagagttccgagataatttctccagaacattgatgagacaataatctccgcaatacatttctcaaatgaataagtttattagacacgtggaagtttgactttttttgtacctttgtacatttttgaaataccgactcgcaaaaaatacaatattcatatccttgttcagatactataccgttgtgtctacaaccgctacataatcgtagattcatgttaacactctacgtatctcgtcgtccaatattttatataaaaacattttatttctagacgttgccagaaaatcctgtaatatttttagttttttgggctgtgaataaagtatcgccctaatatggttaccgtcctccgccaatatagtagttaaattatccgcacatgcagaagaacaccgcttaggcggattcagtacaatgttatatttttcgtaccaactcatttaaatatcataatctaaaatagttctgtaatatgtctagcgctaatatattgatcataatcctgtgcataaattaagatacaacaatgtctcgaaatcatcgacatggcttcttccatagttagaagatcgtcgtcaaagttagcaacgtgattcatcaacatttgctgttttgaggcagcaaatactgaaccatcgccattcaaccattcataaaaaccatcgtctgaatccattgataatttcttgtactggtttttgagagctcgcatcaatctagcatttctagctcccggattgaaaacagaaagaggatcgtacatccagggtccattttctgtaaatagaatcgtataatgtcccttcaagaagatatcagacgatccacaatcaaagaattggtctccgagtttgtaacaaactgcggactttaacctatacatgataccgtttagcataatttctggtgatacgtcaatcggagtatcatctattagagatctaaagccggtgtaacattctccaccaaacatattcttattctgacgtcgttctacataaaacatcattgctccattaacgataacaggggaatgaacagcactacccatcacattagttcccaatggatcaatgtgtgtaactccagaacatcttccatatcctatgttaggaggagcgaacaccactcttccactattgccatcgaatgccatagaataaatatccttggaattgatagaaatcggactgtcggatgttgtgatcatcttcataggattaacaacgatgtatggtgccgcctgaagtttcatatcgtaactgatgccgtttataggtctagccacagaaaccaacgtaggtctaaatccaactatagacaaaatagaagccaatatctgttcctcatctgtcataacttgagagcatccagtatgaataatcttcattagatggggatctaccgcatcatcatcgttacaataaaaaattcccattctaatgttcataattgcttttctaatcatggtatgcatgtttgctctctgaatctctgtggaaattagatctgatacacctgtaatcactatcggattatcctccgtaagacgattaaccaacaacatataattataagactttacttttctaaattcataaagttgctggattaggctataggtgtctccatgtacatacgcgttctcgagcgcaggaagtttaataccgaatagtgccatcagaataggatgaatatagtaattagtttctggttttctataaataaaagacaaatcttgtgaactagacatatcggtaaaatgcatggattggaatcgtgtagtcgacagaagaatatgatgattagatggagagtatattttatctaactctttgagttggtcaccgattctaggactagctcgagaatgaataagtactaaaggatgagtacatttcacagaaacactagcattgttcaatgtgctctttacatgggtaaggagttgaaatagctcgtttctatttgttctgacaatatttagtttattcataatgttaagcatatcctgaatagtaaagttagatgtgtcatacttgttagtagttagatatttagcaattgcattcccatcatttctcaatctcgtactccaatcatgtgtagatgctacttcatctatagaaaccatacaatcctttttgataggctgttgagattgattatttcctgcacgtttaggtttggtacgttgatttctagcccctgcggatataaagtcatcgtctacaatttgggacaatgaattgcatacactacaagacaaagatttatcagaagtgtgaatatgatcttcatctaccaaagaaagagtttgattagtataactagattttagtcctgcgttagatgttaaaaaaacatcgctattgaccacggcttccattatttatattcgtagtttttactcgaaagcgtgattttaatatccaatcttattacttttggaatcgttcaaaacctttgactagttgtagaatttgatctattgccctacgcgtatactcccttgcatcatatacgttcgtcaccagatcgtttgtttcggcctgaagttggtgcatatctttttcaacactcgacatgagatccttaagggccatatcgtctagattttgttgagatgctgctcctggatttggattttgttgtgctgttgtacatactgtaccaccagtaggtgtaggagtacatacagtggccacaataggaggttgaggaggtgtaaccgttggagtagtacaagaaatatttccatccgattgttgtgtacatgtagttgttggtaacgtctgagaaggttgggtagatggcggcgtcgtcgttttttgatctttattaaatttagagataatatcctgaacagcattgctcggcgtcaacgctggaaggagtgaactcgccggcgcatcagtatcttcagacagccaatcaaaaagattagacatatcagatgatgtattagtttgttgtcgtggttttggtgtaggagcagtactactaggtagaagaataggagccggtgtagctgttggaaccggctgtggagttatatgaatagttggttgtagcggttggataggctgtctgctggcggccatcatattatctctagctagttgttctcgcaactgtctttgataatacgactcttgagactttagtcctatttcaatcgcttcatcctttttcgtatccggatccttttcttcagaataatagattgacgactttggtgtagaggattctgccagcccctgtgagaacttgttaaagaagtccatttaaggctttaaaattgaattgcgattataagattaaatggcagacacagacgatattatcgactatgaatccgatgatctcactgaatacgaggatgatgaagaagaggaagaagatggagagtcactagaaactagtgatatagatcccaaatcttcttataagattgtagaatcagcatccactcatatagaagatgcgcattccaatcttaaacatatagggaatcatatatctgctcttaaacgacgctatactagacgtataagtctatttgaaatagcgggtataatagcagaaagctataacttgcttcaacgaggaagattacctctagtttcagaattttctgacgaaacgatgaagcaaaatatgctacatgtaattatacaagagatagaggagggttcttgtcctatagtcatcgaaaagaacggagaattgttgtcggtaaacgattttgacaaagatggtctaaaattccatctagactatattatcaaaatttggaaacttcaaaaacgatattagaatttatacgaatatcgttctctaaatgtcacaatcaagtctcgcatgttcagcaatttattgtcgtactttatatcgtgttcattaacgatatcttgcaaaatagtaatgattctatcttccttcgatagatattcttcagagattattgtcttatattctttcttgttatcagatatgaatttgataagactttgaacattattgatacccgtctgtttaattttttctacagatattttagttttggcagattctatcgtatctgtcaatagacatccaacatcgacattcgacgtcaattgtctataaatcaacgtataaattttagaaataacattagcgaattgttgtgcattgatgtcgttattctgaaacagtatgattttaggtagcattttcttaacaaagagaacgtatttattgttactcagttgaacagatgatatatccagattactaacgcatctgattccgtataccaaactttcagaagaaatggtatacaattgtttgtattcattcaatgtctctttttcagaaattagtttagagtcgaatactgcaataattttcaagagatagttttcatcagataagattttatttagtgtagatatgataaaactattgttttgttggagaacttgatacgccgcgttctctgtagtcgacgctctcaaatgggaaacaatctccattatttttttggaatcggatacaatatcttcggtatcttgacgcagtctagtatacatagagttaagagagattagagtttgtacattaagcaacatgtctctaaatgtggctacaaacttttccttttccacatcatctagtttattatataccgatttcacaacggcaccagatttaaggaaccagaatgaaaaactctgataactacaatatttcatcatagttacgattttatcatcttctatagttggtgtgatagcgcatacctttttctccaagactggaaccaacgtcataaaaatgtttaaatcaaaatccatatcaacatctgatgcgctaagaccagtctcgcgttcaagattatctttactaatggtgacgaactcatcgtataaaactctaagtttgtccattatttatttacagatttagttgtttaatttatttgtgctcttccagagttgggatagtatttttctaacgtcggtattatattattaggatctacgttcatatgtatcataatattaatcatccacgttttgataaatctatctttagcttctgaaataacgtatttaaacaaaggagaaaaatatttagctacggcatcagacgcaataacattttttgtaaatgtaacatatttagacgacagatcttcgttaaaaagttttccatctatgtagaatccatcagttgttaacaccattcccgcgtcagattgaataggagtttgaatagtttgttttggaaatagatccttcaataacttatagttgggtgggaaaaaatcgattttatcactagactctttcttttttactatcattacctcatgaactatttcttgaatgagtatatgtattttctttcctatatcggacgcgttcattggaaaatataccatgtcgttaactataagaatatttttatcctcgtttacaaactgaataatatcagatgtagttcgtaaacgaactatatcatcaccagcacaacatctaactatatgatatccactagtttcctttagtcgtttattatcttgttccatattagcagtcattccatcatttaagaaggcgtcaaagataatagggagaaatgacattttggattctgttacaactttaccaaaattaaggatatacggacttactatctttttctcaacgtcaatttgatgaacacacgatgaaaatgtacttcgatgagattgatcatgtagaaaacaacaagggatacaatatttccgcatatcatgaaatatattaagaaatcccaccttattatatttccccaaaggatccatgcacgtaaacattatgccgttatcattaataaagacttctttctcatcggatctgtaaaagttgttactgatttttttcattccaggatctagataattaataatgatgggttttctattcttattctttgtattttggcatatcctagaccagtaaacagtttccactttggtaaaatcagcagacttttgaacgctattaaacatggcattaatggcaataactaaaaatgtaaaatatttttctatgttaggaatatggtttttcactttaatagatatatggtttttggccaaaatgatagatatttttttatccgaggatagtaaaatattattagtcgccgtctctataaaaatgaagctagtctcgatatccaattttattctagaattgataggagtcgccaaatgtaccttatacgttatatctcccttgatgcgttccatttgtgtatctatatcggacacaagatctgtaaatagttttacgttattaatcatcacggtatcgccgtcgctagataatgctaatgtaccatccaagtcccaaatggagagatttaactgttcatcgtttagaataaaatgattaccggtcatattaataaagtgttcatcgtatctagataacaacgacttataattaatgtccaagtcttgaactcgctgaatgatcttttttaacccagttagttttagattggtacgaaatatattgttaaactttgattctacagtaatgtccaaatctagttgtggaaatacttccatcaacattgtttcaaacttgataatattattatctacatcttcgtacgatccaaattccggaatagatgtatcgcacgctctgaccacccagataaccaaaaagtcacacgctccaggatatacattgtataaaaagctatcgttttttagtagtgtttttttctgagtatatacgaagggattaaaaatagtattatcaacgtaactatattccaaattattcttatgagaatagataataatatcgtccttaatatctaacaaatttcctaaatatccctttaattgagtcattcgaagcgtcaatagaatatgtctcttaactatttccggctgttgtatatttaaatgacttcgtaaaaaataatatatgggcgacttctcatctatgtaatcatatggagtgagatatagggctcgttctacctcctgccccttacccacctgtaataccaattgcggacttactatatatcgcatatttatatcgtggggtaaagtgaaaatctactaccgatgatgtaagtcttacaatgttcgaaccagtaccagatcttaatttggaggcctccgtagaactaggggaggtaaatatagatcaaacaacacctatgataaaggagaatagcggttttatatcccgcagtagacgtctattcgcccatagatctaaggatgatgagagaaaactagcactacgattctttttacaaagactttattttttagatcatagagagattcattatttgttcagatgcgttgacgctgtaaaagacgtcactattaccaaaaaaaataacattatcgtggcgccttatatagcacttttaactatcgcatcaaaaggatgcaaacttacagaaacaatgattgaagcattctttccagaactatataatgaacatagtaagaaatttaaattcaactctcaagtatccatcatccaagaaaaactcggataccagtttggaaactatcacgtttatgattttgaaccgtattactctacagtagctctggctattcgagatgaacattcatctggcatttttaatatccgtcaagagagttatctggtaagttcattatctgaaataacatatagattttatctaattaatctaaaatctgatcttgttcaatggagtgctagtacgggcgctgtaattaatcaaatggtaaatactgtattgattacagtgtatgaaaagttacaactggtcatagaaaatgattcacaatttacatgttcattggctgtggaatcagaacttccaataaaattacttaaagatagaaatgaattatttacaaaattcattaacgagttaaaaaagaccagttcattcaagataagcaaacgcgataaggatacgctattaaaatattttacttaggactggagttagaatttatagacgactcatttcgtttatcattattactaccatcattattagtattcttcttgtcatcttgttcagaaatatacagcaatgctatacctaatactaaatacattatcatgctcgcaatggctctaacaacaacgaaccaaaatgaatttggtcgtagcttttgttcacaaaaatacataaagaaatgtctacataaatctatggcgccattggctacttgaaatagcgccagtcctcctacagattttaatatagctgtataacatgacatttattcatcatcaaaagagacagagtcaccatctgtcatatttagattttttttcatgtgttcaaagtatcctctactcatttcattataatagtttatcatacttagaattttaggacggatcaatgagtaagacttgactagatcgtcagtagtaatttgtgcatcgtctattctgcatccgcttcgtcgaataatgtatagcatcgctttgagattctccatagctatcaagtctttatacaatgacatggaaatatctgtgaatactttatacttctccaacatcgatgccttaacatcatcgcctactttagcattgaaaatacgttctattgtgtagatggatgtagcaagatttttaaacaacaatgccattttacacgatgattgcctcaagtctccaatcgtttgtttagaacgattagctacagagttcaacgcttggctgactagcatattattatctttagaaattgtattcttcaatgaggcgtttatcatatctgtgatttcgttagtcatattacagtctgactgggttgtaatgttatccaacatatcacctatggatacggtacacgtaccagcatttgtaataatcctatctaagatgttgtatggcattgcgcagaaaatatcttctcctgtaatatctccactctcgataaatctactcagattattcttaaatgccttattctctggagaaaagatatcagtgtccatcatttcattaatagtatacgcagaaaagataccacgagtatcaattctatccaagatacttatcggttccgagtcacagataatggtttcctctccttcgggagatcctgcatagaaatatctaggacaatagtttctatactgtctgtaactctgataatctctaaagtcactaactgataccatgaaattgagaagatcaaacgctgaagtaattaatttttctgcctcgtttttactacaactagttttcatcaatgtagtgacgatgtattgtttagttactcttggtctaatactgatgatagagatattattacttcccataatggatcttctagtagtcaccttaaagcccattgatgcaaatagcagatagataaagtcttggtatgactcctttctaatatagtacggactacctttgtcacccaactttatacccacataagccataacaacctctttaatagccgtttcatgaggtttatcagccatgagcctgagtagttggaagaatctcatgaatcccgtctcagaaagtcctatatgcatgatagatttatctttcctgggaaactctcgtatagtcatagatgaaatactcttcaaagtttctgaaataagattagtaacagtcttacctccgactactctaggtaacaaacaaactctaataggtgttttctctgcggagataatatcagaaaggatagagcaataagtagtattattgtgattataaagaccgaatacataacaggtagaatttataaacatcatgtcctgaaggtttttagacttgtattcctcgtaatccataccgtcccaaaacatggatttggtaactttgatagccgtagatctttgttccttcgccaacaggttaaagaaattaataaagaatttgttgtttctatttatgtccacaaattgcacgtttggaagcgccacggttacattcactgcagcattttgaggatcgcgagtatgaagtacgatgttattgtttactggtatatctggaaagaaatctaccagtctaggaataagagattgatatcgcatagaaatacaaaagttcataatctcatcatcgaagagcattttgttaccattgtaataaatatccactctgtcatatgtataaatgaagtactgttcaaacatgatgagatgtttatatgttggcatagtagtgagatcgacgtttggtaatggcaatgtattaagattaactccataatgtctagcagcatctgcgatgttataagtgttgtcaaagcggggtcgatcttgtgctgttatatattgtctaacacctataagattatcaaaatcttgtctgcttaatacaccgttaacaatttttgccttgaattcttttattggtgcattaataacatccttatagaggatgttaaacaaataagtattatcaaagttaagatctgggtatttcttttctgctagaacatccattgagtcggagccatctggtttaatataaccaccgataaatctagctctgtattctgtatccgtcaatctaatattaagaaggtgttgagtgaaaggtggaagatcgtaaaagctgtgagtattaatgataggattagtttccgaactaatgttaattggggtattaataatatctatatttccagcgttaagtgtaacattaaacagttttaattcacgtgacgtggtatcaattaaataattaatgcccaatttggatatagcagcctgaagctcatcttgtttagttacggatcctaatgagttattaagcaatatatcgaacggatgaacgaaggttgttttgagtttgtcgcatactttgtaatctagacatagatgcggaagaacggtagaaactatacgaaataaatattcagagtcctctaattgatcaagagtaactattgacttaataggcatcatttatttagtattaaatgacgaccgtaccagtgacggatatacaaaacgatttaattacagagttttcagaagataattatccatctaacaaaaattatgaaataactcttcgtcaaatgtctattctaactcacgttaacaacgtggtagatagagaacataatgccgccgtagtgtcatctccagaggaaatatcctcacaacttaatgaagatctatttccagatgatgattctccggccactattatcgaaagagtacaacctcatactactattattgacgatactccacctcctacgtttcgtagagagttattgatatcggaacaacgtcaacaacgagaaaaaagatttaatattacagtatcgaaaaatgctgaagcaataatggaatctagatctatgatatcttctatgccaacacaaacaccatccttgggagtagtttatgataaagataaaagaattcagatgttggaggatgaagtggttaatcttagaaatcaacgatctaatacaaaatcatctgataatttagataattttaccagaatactatttggtaagactccgtataaatcaacagaagttaataagcgtatagccatcgttaattatgcaaatttgaacgggtctcccttatcagtcgaggacttggatgtttgttcagaggatgaaatagatagaatctataaaacgattaaacaatatcacgaaagtagaaaacgaaaaattatcgtcactaacgtgattattattgtcataaacattatcgagcaagcattgctaaaactcggatttgaagaaatcaaaggactgagtaccgatatcacttcagaaattatcgatgtggagatcggagatgactgcgatgctgtagcatctaaactaggaatcggtaacagtccggttcttaatattgtattgtttatactcaagatattcgttaaacgaattaaaattatttaatttaatacattcccatatccagacaacaatcgtctggattaatctgttcctgtcgtctcataccggacgacatattaatctttttattagtaggcatctttttagatggtttctttttcccagcattaactgagtcgatacctagaagatcgtgattgatctctccgaccattccacgaacttctaattggccgtctctgacggtaccataaactattttaccagcattagtaacagcttggacaatctgaccatccatcgcattgtacgatgtagtagtaactgttgttctacgtctaggagcaccagaagtatttttggagcccttggaggttgatgtagaagaagacgaggattttgattttggtttacatgtaatacattttgaactctttgattttgtatcacatgcgccggcagtcacatctgtttgagaattaagattattgttgcctcctttgacggctgcatctccaccgatttgcgctagtagatttttaagctgtggtgtaatcttattaactgtttcgatataatcatcgtaactgcttctaacggctaaattttttttatccgccatttagaagctaaaaatatttttatttatacagaagatttaactagattatacaatgaactaatatgatccttttccagattatttacaaacttggtattttttggttctggaggaggcgaatttaaattcggacttggattcggattttgtgagttcttgatcttattatacatcgagtataggatggcgacggtaactgctacgcaaataccgatcaacaaaagaataccaatcatttattgacaataacttcactattgatcaagtatgcaatatatcatcttttcactaaataagtagtaataatgattcaacaatgtcgagatatatggacgataataatttagttcatggaaatatcgctatgattggtatgaatgactccgctaactctgtggggtgcgcagtgctttccccacatagaataaattagcattccgactgtgataataataccaagtataaacgccataatactcaatactttccatgtacgagtgggactggtagacttactaaagtcaataaaggcgaagatacacgaaagaatcaaaagaatgattccagcgattagcacgccggaaaaataatttccaatcataagcatcatgtccatttaactaataaaaattttaaatcgccgaatgaacaaagtggaatataaaccatataaaaacaatagtttgtactgcaaaaataatatctatttttgttttcgaagatatggtaaaattaaatagtagtacacagcatgttataactaacagcagcaacggctcgtaattacttatcatttactagacgaaaaggtggtgggatattttcttgctcaaataatacgaatatatcacccatccattttatgcgatgtttatatactctaatctttaatagatctatagacgacgggtttaccaacaatatagattttatcgattcatctaatttaaacccttccttaaacgtgaatgatctattatctggcataacgatgactctacctgatgaatcggacaatgtactgggccatgtagaataaattatcaacgaattatcgtctacgaacatttatatcatttgttttaattttaggacgcgaataaatagatataaaatagaaaataacagatattacaaccaatgttatggccgcgcccaaccaggtaggcagttttattttatcttttactacaggttctcctggatgatgtacgtcaccaacggcggacgtagttctagtacaattagacgtaagttctgcttgggaattttttaacgctaaagagttaacgttaatcgtgcacccaacgtatttacatctagttctttgaacatcttgattataatataaccattttctatctctagattcgtcggtgcactcatgtaaccaacataccctaggtcctaaatatttatctccggaattagattttggataattcgcgcaccaacaatttctatttcctttatgatcgttacaaaagacgtataatgccgtatccccaaaagtaaaataatcaggacgaataattctaataaactcagaacaatatctcgcatccatatgtttggagcaaatatcggaataagtagacatagccggtttccgttttgcacgtaaccattctaaacaattggggtttccaggatcgtttctacaaaatccagtcatgaaatcgtcacaatgttctgtcttgtaattattattaaatatttttggacagtgtttggtatttgtcttagaacaacattttgctacgctatcactatcgcccaggagataatccttttttataaaatgacatcgttgcccggatgctatataatcagtagcgtgttttaaatccttaatatattcaggagttacctcgttctgataatagattaatgatccaggacgaaatttgaaagaactacatggttctccatgaattaatacatattgtttagcaaattcaggaactataaaactactacaatgatctatcgacataccatctatcaaacaaaatttgggtttaatttctcccggagatgtttcataatagtacgtataactttcttctgcaaacttaacagctctattatattcaggataattaaaacctaattccatatatttgtctcgtatatctgctattcctggtgctattttgattctattaagagtaacagctgcccccattcttaataatcgtcagtatttaaactgttaaatgttggtatatcaacatctaccttatttcccgcagtataaggtttgttgcaggtatactgttcaggaatggttacatttatacttcttctatagtcctgtctttcgatgttcatcacatatgcaaagaacagaataaacaaaataatgtaagaaataatattaaatatctgtgaattcgtaaatacattgattgccataataattacagcagctacaatacacacaatagacattcccacagtgttgccattacctccacgatacatttgagttactaagcaataggtaataactaagctagtaagaggcaatagaaaagatgagataaatatcatcaatatagagattagaggagggctatatagagccaagacgaacaaaatcaaaccgagtaacgttctaacatcattatttttgaagattcccaaataatcattcattcctccataatcgttttgcatcatacctccatctttaggcataaacgattgctgctgttcctctgtaaataaatctttatcaagcactccagcacccgcagagaagtcgtcaagcatattgtaatatcttaaataactcatttatatattaaaaaatgtcactattaaagatggagtataatctttatgccgaactaaaaaaaatgacttgtggtcaacccctaagtctttttaacgaagacggggatttcgtagaagttgaaccgggatcatcctttaagtttctgatacctaagggattttacgcctctccttccgtaaagacgagtctagtattcgagacattaacaacgaccgataataaaatcactagtatcaatccaacaaatgcgccaaagttatatcctcttcaacgcaaagtcgtatctgaagtagtttctaatatgaggaaaatgatcgaatcaaaacgtcctctatacattactcttcacttggcgtgtggatttggtaagactattaccacgtgttatcttatggctacacacggtagaaaaaccgtcatttgcgtacccaataaaatgttaatacatcaatggaagacacaggtagaggcagtcggattggaacataagatatccatagatggagtaagtagtctattaaaggaactaaagactcaaagtccggatgtattaatagtagtcagtagacatctgacaaacgatgccttttgtaaatatatcaataagcattatgatttgttcatcttggatgaatcacatacgtataatctgatgaacaatacagcagttacaagatttttagcgtattatcctccgatgatgtgttattttttaactgctacacctagaccagctaaccgaatttattgtaacagtattattaatattgccaagttatccgatctaaaaaaaactatctatgcggtagatagtttttttgagccatattccacagataatattagacatatgataaaacgattagatggaccatctaataaatatcatatatatactgagaagttattatctgtagacgagcctagaaatcaacttattcttgataccctggtagaagaattcaagtcaggaactattaatcgaattttagttattactaaactacgtgaacatatggtattcttctacaaacgattattagatcttttcggaccagaggttgtatttataggagacgcccaaaatagacgtactccagatatggtcaaatcaatcaaggaactaaatagatttatattcgtatccaccttattttattccggtactggtttagatattcctagtttggattcgttgttcatttgctcggcagtaatcaacaatatgcaaatagagcaattactagggagggtatgtcgagaaacagaactattagataggacggtatatgtatttcctagcacatccatcaaagaaataaagtacatgataggaaatttcatgcaacgaattattagtctgtctgtagataaactaggatttaaacaaaaaagttatcggaaacatcaagaatccgatcccacttctgtatgtacaacatcctccagagaagaacgtgtattaaatagaatatttaactcgcaaaatcgttaagaagtttaagcgacgatccgcatgctgcgcaggccagtgtattacccctcatagtattaatataatccaatgatacttttgtgatgtcggaaatcttaaccaatttagactgacaggcagaacacgtcatgcaatcatcatcgtcatcgataactgtagtcttgggcttctttttgcggctcttcattccggaacgcacattggtgctatccatttaggtagtaaaaaataagtcagaatatgccctatagcacgatcgtgcaaaacctggtatatcgtctctatctttatcacaatatagtgtatcgacatctttattattattgacttcgtttatcttggaacatggaatgggaacatttttgttatcaacggccacctttgccttaattccagatgttgtaaaattataactaaacagtctatcatcgacacaaatgaaattcttgtttagacgtttgtagtttacgtatgcggctcgttcgcgtctcattttttcagatattgcaggtactataatattaaaaataagaatgaaataacataggattaaaaataaagttatcatgacttctagcgctgatttaactaacttaaaagaattacttagtctgtacaaaagtttgagattttcagattctgcggctatagaaaagtataattctttggtagaatggggaacatctacttactggaaaataggcgtgcaaaaggtagctaatgtcgagacgtcaatatctgattattatgatgaggtaaaaaataaaccgtttaatattgatccgggctattacattttcttaccggtatattttgggagcgtctttatttattcgaagggtaaaaatatggtagaacttggatctggaaactcttttcaaataccagatgatatgcgaagtgcgtgtaacaaagtattagacagcgataacggaatagactttctgagatttgttttgttaaacaatagatggataatggaagatgctatatcaaaatatcagtctccagttaatatatttaaactagctagtgagtacggattaaacatacccaaatatttagaaattgaaatagaggaagacacattatttgacgacgagttatactctattatagaacgctcttttgatgataaatttccaaaaatatccatatcgtatattaagttgggagaacttagacggcaagttgtagactttttcaaattctcgttcatgtatattgagtccatcaaggtagatcgtataggagataatatttttattcctagcgttataacaaaatcaggaaaaaagatattagtaaaagatgtagaccatttaatacgatccaaggttagagaacatacatttgtaaaagtaaaaaagaaaaacacattttccattttatacgactatgatggaaacggaacagaaactagaggagaagtaataaaacgaattatagacactataggacgagactattatgttaacggaaagtatttctctaaggttggtagtgcaggcttaaagcaattgactaataaattagatattaatgagtgcgcaactgtcgatgagttagttgatgagattaataaatccggaactgtaaaacgaaaaataaaaaaccaatcagcatttgatttaagcagagaatgtttgggatatccagaagcggattttataacgttagttaataacatgcggttcaaaatagaaaattgtaaggttgtaaatttcaatattgaaaatactaattgtttaaataacccgagtattgaaactatatatagaaactttaaccagttcgtctcaatctttaatgtcgtcaccgatgtcaaaaaaagattattcgagtgaaataatatgcgcctttgatataggtgcaaaaaatcctgccagaactgttttagaagtcaaggataactccgttagggtattggatatatcaaaattagactggagttctgattgggaaaggcgcatagctaaagatttgtcacaatatgaatacactacagttcttctagaacgtcagcctagaaggtcgccgtatgttaaatttatctattttattaaaggctttttatatcatacatcggctgccaaagttatttgcgtctcgcctgtcatgtctggtaattcatatagagatcgaaaaaagagatcggtcgaagcatttcttgattggatggacacattcggattgcgagactccgttccggatagacgcaaattagacgatgtagcggatagtttcaatttggctatgagatacgtattagataaatggaatactaattatacaccttataataggtgtaaatctaggaattacataaaaaaaatgtaataacgttagtaacgccattatggataatctatttacctttctacatgaaatagaagatagatatgccagaactatttttaactttcatctaataagttgcgatgaaataggagatatatatggtcttatgaaagaacgaatttcctcagaggatatgtttgataatatagtgtataataaagatatacatcatgccattaagaaactagtgtattgcgacatccaacttactaaacacattattaatcagaatacgtatccggtatttaacgattcttcacaagtgaaatgttgtcattatttcgatataaactcagataatagcaatattagctctcgtacagtagagatatttgagagggaaaagtcatctcttgtatcatatattaaaactaccaataagaagagaaaggtcaattacggcgaaataaagaaaactgttcatggaggcactaatgcaaattacttttccggtaaaaagtctgatgagtatctgagtactacagttagatccaacattaatcaaccttggatcaaaaccatttctaagagaatgagagtagatatcattaatcactctatagtaacgcgtggaaaaagctctatattacaaactatagaaattatttttactaatagaacatgtgtgaaaatattcaaggattctactatgcacattattctatccaaggacaaggatgaaaaggggtgtatacacatgattgacaaattattctatgtctattataatttatttctgttgttcgaagatatcatccaaaacgagtactttaaagaagtagctaatgttgtaaaccacgtacttacggctacggcattagatgagaaattattcctaattaagaaaatggctgaacacgatgtttatggagttagcaatttcaaaatagggatgtttaacctgacatttattaagtcgttggatcataccgttttcccctctctgttagatgaggatagcaaaataaagttttttaaggggaaaaagctcaatattgtagcattacgatctctggaggattgtataaattacgtgactaaatccgagaatatgatagaaatgatgaaggaaagatcgactattttaaatagcatagatatagaaacggaatcggtagatcgtctaaaagaattgcttctaaaatgaaaaaaaacactgattcagaaatggatcaacgactcggatataagtttttggtgcctgatcctaaagccggagttttttatagaccgttacatttccaatatgtatcgtattctaattttatattgcatcgattgcatgaaatcttgaccgtcaagcggccactcttatcgtttaagaataatacagaacgaattatgatagaaattagcaatgttaaagtgactcctccagattactcacctataatcgcgagtattaaaggtaagagttatgacgcattagccacgttcactgtaaatatctttaaagaggtaatgaccaaagagggtatatccatcactaaaataagtagttatgagggaaaagattctcatttgataaaaattccgctactaataggatacgggaataaaaatccacttgatacagccaagtatcttgttcctaatgtcataggtggagtctttatcaataaacaatctgtcgaaaaagtaggaattaatctagtagaaaagattacaacatggccaaaatttagggttgttaagccaaactcattcactttctcgttttcctccgtatcccctcctaatgtattaccgacaagatatcgccattacaagatatctctggatatatcacaattggaagcgttgaatatatcatcgacaaagacatttataacggtcaatattgttttgctgtctcaatatttatctagagtgagtctagaattcattagacgtagcttatcatacgatatgcctccagaagttgtctatctagtaaacgcgataatagatagtgctaaacgaattactgaatctattactgactttaatattgatacatacattaatgacctggtggaagctgaacacattaaacaaaaatctcagttaacgatcaacgagttcaaatatgaaatgctgcataactttttacctcatatgaactatacacccgatcaactaaagggattttatatgatatctttactaagaaagtttctctactgtatctaccacacttctagatatccagatagagattcgatggtttgtcatcgtatactaacatacggcaaatattttgagacgttggcacatgatgaattagagaattacataggcaacatccgaaacgatatcatgaacaatcacaagaacagaggcacttacgcggtaaacattcatgtactaacaactcctggacttaatcatgcattttctagcttattgagtggaaagttcaaaaagtcagacggtagttatcgaacacatcctcactattcatggatgcagaatatttctattcctaggagtgttggattttatccggatcaagtaaagatttcaaagatgttttctgtcagaaaataccatccaagtcaatatctttacttttgttcatcagacgttccggaaagaggtcctcaggtaggtttagtatctcaattgtctgtcttgagttccattacaaatatactaacgtctgagtatttggatttggaaaagaaaatttgtgagtatatcagatcatattataaagatgatataagttactttgaaacaggatttccaatcactatagaaaatgctctagtcgcatctcttaatccaaatatgatatgtgattttgtaactgactttagacgtagaaaacggatgggattcttcggtaacttggaggtaggtattactttagttagggatcacatgaatgaaattcgcattaatattggagcgggaagattagtcagaccattcttggttgtggataacggagagctcatgatggatgtgtgtccggagttagaaagcagattagacgatatgacattctctgacattcagaaagagtttccacatgtcatcgaaatggtagatatagaacaatttacttttagtaacgtatgtgaatcggttcaaaaatttagaatgatgtcaaaggatgaaagaaagcaatacgatttatgtgactttcctgccgaatttagagatggatatgtggcatcttcattagtgggaatcaatcacaattctggacccagagctattcttggatgtgctcaagctaaacaagctatctcttgtctgagttcggatatacgaaataaaatagacaatggaattcatttgatgtatccagagaggccaatcgtgattagtaaggctttagaaacttcaaagattgcggctaattgcttcggccaacatgttactatagcattaatgtcgtacaaaggtatcaatcaagaggatggaattatcatcaaaaaacaatttattcagagaggcggtctcgatatagttaccgcaaagaaacatcaagtagaaattccgttggaaaactttaataacaaagaaagagataggtctaatgcatattcgaaattagaaagtaatggattagttagactgaatgctttcttggaatccggagacgctatggcacgaaatatctcatcaagaactcttgaagatgattttgctagagataatcagattagcttcgatgtttccgagaaatataccgatatgtacaaatctcgcgttgaacgagtacaagtagaacttactgacaaagttaaggtacgagtattaaccatgaaagaaagaagacccattctaggagacaaatttaccactagaacgagtcaaaagggaacagtcgcgtatgtcgcggatgaaacggaacttccatacgatgaaaatggtatcacaccagatgtcattattaattctacatccatcttctctagaaaaactatatctatgttgatagaggttattttaacagccgcatattctgctaagccgtacaacaataagggagaaaaccgacctgtctgttttcctagtagtaacgaaacatccatcgatacatatatgcaattcgctaaacaatgttatgagcattcaaatccgaaattgtctgatgaagaattatcggataaaatcttttgtgaaaagattctctatgatcctgaaacggataagccttatgcatccaaagtattttttggaccaatttattacttgcgtctgaggcatttaactcaggacaaggcaaccgttagatgtagaggtaaaaagacgaagctcattagacaagcgaatgagggacgaaaacgtggaggaggtattaagtttggagaaatggagagagactgtttaatagcgcatggcgcagccaatactattacagaagttttgaaagattcggaagaagattatcaagatgtgtatgtttgtgaaaattgtggagacatagcagcacaaatcaagggtattaatacatgtcttagatgttcaaaacttaatctctctcctctcttaacaaaaattgataccacgcacgtatctaaagtatttcttactcaaatgaacgccagaggcgtaaaagtcaaattagatttcgaacgaaggcctccttcgttttataaaccattagataaagttgatctcaagccgtcttttctggtgtaatattctagtttggtagtagatacatatcaatatcatcaaattcgagatccgaattataaaatgggcgtggattgttaactatagaatcggacgtctgatattcgaaaatctgtggagtttcaggttttggtggaggtgtaactgctacttgggatactgaagtctgatattcagaaagctgggggatgttctggttcgacatccaccgatggtgtcacatcactaatcggttcggtaacgtctgtggatggaggtgctacttctacagaacctgtagcctcagttgtcaacggagatacatttttaatgcgaggaaatgtataatttggtaatggtttctcatgtggatctgaagaagaggtaagatatctactagaaagataccgatcacgttctagttctcttttgtagaacttaactttttctttctcagcatctagttgatattccaacctcttcacgttactacgttcagatttcaattcacgttcgcatgggttacctccgcagtttttacgagcgatttcacgttcagccttcatgcgtctctgtgatccgtttacgttaaaccataaatacatgggtgatcctataaacatgaatttatttctaattctcagagctatagttaattgaccgtgtaatatttgcttacatgcatacttgatacgctcattaataagatttttatcattgctcgttatctcagaatcgtatatataaggagtaccatcgtgattcttaccagatattatacaaaatactatatataaaatatattgaccaacgttagtaatcatataaatgtttaacgttttaaattttgtattcaatgatccattatcatacgctagcatggtcttatgatattcattctttaaaatataatattgtgttagccattgcattggagctcctaatggagattttctattctcgtccattttaggatatgctttcataaagtccctaataacttcgtgaataatgtttctatgttttctactgatgcatgtatttgcttcgatttttttatcccatgtttcatctatcatagatttaaacgcagtaatgctcgcaacattaacatcttgaaccgttggtacaattccgttccataaatttataatgttcgccatttatataactcattttttgaatatacttttaattaacaaaagagttaagttactcatatggacgccgtccagtctgaacatcaatctttttagccagagatatcatagccgctcttagagtttcagcgtgattttccaacctaaatagaacttcatcgttgcgtttacaacacttttctatttgttcaaactttgttgttacattagtaatctttttttccaaattagttagccgttgtttgagagtttcctcattgtcgtcttcatcggctttaacaattgcttcgcgtttagcctctggctttttatcagcctttgtagaaaaaaattcagttgctggaattgcaagatcgtcatctccggggaaaagagttccgtccatttaaagtacagattttagaaactgacactctgcgttatttatatttggtacaacacatggattataaatattgatgttaataacatcagaaaatgtaaagtctatacattgttgcatcgtgttaaattttctaatggatctagtattattgggtccaacttctgcctgaaatccaaatatggaagcggatacaaaaccgtttcctggataaaccacacatctccacttttgctttacatcagaaattgtgtcgttgacatcttgaactctcctatctaatgccggtgttccacctatagattttgaatattcgaatgctgcatgagtagcattaaattccttaatattgccataattttcatatattgagtaaccctggataaaaagtaaacacaccgcagccgtcgctaccacaataaaaaaaattgatagagagttcatttataatctattagaagctgacaaaatttttttacacgcatcagacaatgctttaataaatagttcaacatctacttttgtcatatcgaaccgatggtatgattctaacctagaattacatccgaaaaagttgactatgttcatagtcattaagtcattaacaaacaacattccagactctggattataagacgatactgtttcgtcacaatcacctaccttaatcatgtgattatgaatattggctattagagcaccttctaagaaatctataatatctttgaaacacgatttaaaatcaaaccacgaatatacttctacgaagaaagttagtttacccataggagagataactataaatggagatctaaatacaaaatccggatctatgatagttttaacattattatattctctattaaatacctccacatctaaaaatgttaattttgaaactatgtcttcgtttattaccgtacctgaactaaacgctataagctctattgtttgagaactctttaaacgatattcttgaaatacatgtaacaaagtttcctttaactcggtcggtttatctaccatagttacagaatttgtatccttatctataatataataatcaaaatcgtataaagttatataattatcgcgttcagattgggatcttttcaaatagactaaaaaccccatttctctagtaagtatcttatgtatatgtttgtaaaatatcttcatggtgggaatatgctctaccgcagttagccattcctcattgacagcggtagatgtattagacaaaactattccaatgtttaacaagggccattttacgagattattaaatccttgtttgataaatgtagccaatgagggttcgagttcaacgacgattgaattctcttcccgcggatgctgcatgatgaacgacgggatgttgttcgattgatttggaattctttttcgactttttgtttatattaaatattttaaaatttatagctgatagcaattcatgtaccacggataatgtagacgcgtattgcgcatcgatatctttattattagataaatttatcaataaatgtgagaagtttgcctcgttaaggtcttccatttaaatattatataaacatttgtgtttgtatcttattcgtcttttatggaatagttttttactagtaaagctgcaattacacactttgtccgtaaaacataaatataaacaccagcttttatcaatcgttccaaaaagtcgacggcggacatttttaacatggcatctattttaaatacacttaggtttttggaaaaaacatcattttataattgtaacgattcaataactaaagaaaagattaagattaaacataagggaatgtcatttgtattttataagccaaagcattctaccgttgttaaatacttgtctggaggaggtatatatcatgatgatttggttgtattggggaaggtaacaattaatgatctaaagatgatgctattttacatggatttatcatatcatggagtgacaagtagtggagtaatttacaaattgggatcgtctatcgatagactttctctaaataggactattgttacaaaagttaataattatgatgatacattttttgacgacgatgattgatcgctattgcacaattttgtttttttactttctaatatagcgtttagattctttttcatgtgcgaatattgatttactaaaatatcgatgtttaacttttgttctatgacgtccttatcggcggtatcggtacatatacgtaattcaccttcacaaaatacggagtcttcgataataatagccaatcgattattggatctagctgtctgtatcatattcaacatgtttaatatatcctttcgtttcccctttacaggcatcgatcgtagcatattttccgcgtctgagatggaaatgttaaaactacaaaaatgcgtaatgttagcccgtcctaatattggtacgtgtctataagtttggcatagtagaataatagacgtgtttaaatgccttccaaagtttaagaattctattagagtattgcattttgatagtttatcgcctacatcatcaaaaataagtaaaaagtgtgctgattttttatgattttgtgcgacagcaatacatttttctatgttacttttagttcgtatcagattatattctagagattcctgactactaacgaaattaatatgatttggccaaatgtatccatcataatctgggttataaacgggtgtaaacaagaatatatgtttatattttttaactagtgtagaaaacagagatagtaaatagatagtttttccagatccagatcctcccgttaaaaccattctaaacggcatttttaataaattttctcttgaaaattgtttttcttggaaacaattcataattatatttacagttactaaattaatttgataataaatcaaaatatggaaaactaaggtcgttagtagggaggagaacaaagaaggcatatcgtgatataaataacatttattatcatgatgacaccagaaaacgacgaagagcagacatctgtgttctccgctactgtttacggagacaaaattcaaggaaagaataaacgcaaacgcgtgattggtctatgtattagaatatctatggttatttcactactatctatgattaccatgtccgcgtttctcatagtgcgcctaaatcaatgcatgtctgctaacgaggctgctattactgacgccgctgttgccgttgctgctgcatcatctactcatagaaaggttgcgtctagcactacgcaatatgatcacaaagaaagctgtaatggtttatattaccagggttcttgttatatattacattcagactaccagttattctcggatgctaaagcaaattgcactgcggaatcatcaacactacccaataaatccgatgtcttgattacctggctcattgattatgttgaggatacatggggatctgatggtaatccaattacaaaaactacatccgattatcaagattctgatgtatcacaagaagttagaaagtatttttgtgttaaaacaatgaactaatatttatttttgtacattaataaatgaaatcgcttaatagacaaactgtaagtatgtttaagaagttgtcggtgccggccgctataatgatgatactctcaaccattattagtggcataggaacatttctgcattacaaagaagaactgatgcctagtgcttgcgccaatggatggatacaatacgataaacattgttatctagataccaacattaaaatgtccacagataatgcggtttatcagtgtcgtaaattacgagctagattgcctagacctgatactagacatctgagagtattgtttagtattttttataaagattattgggtaagtttaaaaaagaccaataataaatggttagatattaataatgataaagatatagatattagtaaattaacaaattttaaacaactaaacagtacgacggatgctgaagcgtgttatatatacaagtctggaaaactggttaaaacagtatgtaaaagtactcaatctgtactatgtgttaaaaaattctacaagtgacaacaaaaaatgaattaataataagtcgttaacgtacgccgccatggacgccgcgtttgttattactccaatgggtgtgttgactataacagatacattgtatgatgatctcgatatttcaatcatggactttataggaccatacattataggtaacataaaaactgtccaaatagatgtacgggatataaaatattccgacatgcaaaaatgctactttagctataagggtaaaatagttcctcaggattctaatgatttggctagattcaacatttatagcatttgtgccgcatacagatcaaaaaataccatcatcatagcatgcgactatgatatcatgttagatatagaagataaacatcagccattttatctattcccatctattgatgtttttaacgctacaatcatagaagcgtataacctgtatacagctggagattatcatctaatcatcaatccttcagataatctgaaaatgaaattgtcgtttaattcttcattctgcatatcagacggcaatggatggattataattgatgggaaatgcaatagtaattttttatcataaaagttgtaaagtaaataataaaacaataaatattgaactagtagtacgtatattgagcaatcagaaatgatgctggtacctcttatcacggtgacagtagttgcgggaacaatattagtatgttatatattatatatttgtaggaaaaagatacgtactgtctataatgacaataaaattatcatgacaaaattaaaaaagataaagagttctaattccagcaaatctagtaaatcaactgatagcgaatcagactgggaggatcactgtagtgctatggaacaaaacaatgacgtagataatatttctaggaatgagatattggacgatgatagcttcgctggtagtttaatatgggataacgaatccaatgttatggcgcctagcacagaacacatttacgatagtgttgctggaagcacgctgctaataaataatgatcgtaatgaacagactatttatcagaacactacagtagtaattaatgaaacggagactgttgaagtacttaatgaagataccaaacagaatcctaactattcatccaatcctttcgtaaattataataaaaccagtatttgtagcaagtcaaatccgtttattacagaacttaacaataaatttagtgagaataatccgtttagacgagcacatagcgatgattatcttaataagcaagaacaagatcatgaacacgatgatatagaatcatcggtcgtatcattggtgtgattagtttcctttttataaaattgaagtaatatttagtattattgctgccgtcacgttgtacaaatggagatattccctgtattcggcatttctaaaattagcaattttattgctaataatgactgtagatattatatagatacagaacatcaaaaaattatatctgatgagatcaatagacagatggatgaaacggtacttcttaccaacatcttaagcgtagaagttgtaaatgacaatgagatgtaccatcttattccccatagactatcgactattatactctgtattagttctgtcggaggatgtgttatctctatagataatgacgtcaatggcaaaaatattctaacctttcccattgatcatgctgtaatcatatccccactgagtaaatgtgtcgtagttagcaagggtcctacaaccatattggttgttaaagcggatatacctagcaaacgattggtaacatcgtttacaaacgacatactgtatgtaaacaatctatcactgattaattatttgccgttgtctgtattcattattagacgagttaccgactatttggatagacacatatgcgatcagatatttgcgaataataagtggtattccattataaccatcgacaataagcagtttcctattccatcaaactgtataggtatgtcctctgccaagtacataaattctagcatcgagcaagatactttaatacatgtttgtaacctcgagcatccattcgacttagtatacaaaaaaatgcagtcgtacaattctgtacctatcaaggaacaaatattgtacggtagaattgataatataaatatgagcattagtatttctgtgtattaatagatttctagtatggggatcattaatcatctctaatctctaaatacctcataaaacgaaaaaaaagctattatcaaatactgtacggaatggattcattctcttctctttttatgaaactctgttgtatatctactgataaaactggaagcaaaaaatctgatagaaagaataagaataagatcaagatcaaggattatatggaacacgattattataaaataacaatagttcctggttcctcttccacgtctactagctcgtggtattatacacatgcctagtaatagtctctttgcgttgacggaaagcagactagaaataacaggctaaaatgttcagacaccataatagttcccaacccagataataacagagtaccatcaacacattcctttaaactcaatcccaaacccaaaaccgttaaaatgtatccggccaattgatagtagataatgaggtgtacagcgcatgataatttacacagtaaccaaaatgaaaatactttagtaattataagaaatatagatggtaacgtcatcatcaacaatccaataatatgccggagagtaaacattgacggataaaacaaaaatgctccgcataactctatcatggcaataacacaaccaaatacttgtaagattcctaaattagtagaaaatacaacggatatcgatgtataagtgatctcgagaaataataagaataaagtaatgcccgtaaagataaacatcaacattgtttggtaatcattaaaccaattagtatgaagttgaactaatttcacagtagattttattccagtgttatcctcgcatgtataagtacctggtaagatatctttatattctataatcaatgagacatcactatccgataacgaatgaagtctagcactagtatgccatttacttaatattgtcgtcttggaagttttattataagttaaaatatcatggttatccaatttccatctaatatactttgtcggattatctatagtacacggaataatgatggtatcattacatgctgtatactctatggtctttgtagttgttataacaaccaacgtatagaggtatatcaacgatattctaactcttgacattttttatttatttaaaatgatacctttgttatttattttattctattttgctaacggtattgaatggcataagtttgaaacgagtgaagaaataatttctacttacttattagacgacgtattatacacgggtgttaatggggcggtatacacattttcaaataataaactaaacaaaactggtttaactaataataattatatcacaacatctataaaagtagaggatgcggataaggatacattagtatgcggaaccaataacggaaatcccaaatgttggaaaatagacggttcagacgacccaaaacatagaggtagaggatacgctccttatcaaaatagcaaagtaacgataatcagttacaacgaatgtgtactatctgacataaacatatcaaaagaaggaattaaacgatggagaagatttgacggaccatgtggttatgatttatacacggcggataacgtaattccaaaagatggtttacgaggagcattcgtcgataaagatggtacttatgacaaagtttacattcttttcactgatactatcggctcaaagagaattgtcaaaattccgtatatagcacaaatgtgcctaaacgacgaaggtggtccatcatcattgtctagtcatagatggtcgacgtttctcaaagtcgaattagaatgtgatatcgacggaagaagttatagacaaattattcattctagaactataaaaacagataatgatacgatactatatgtattcttcgatagtccttattccaagtccgcattatgtacctattctatgaataccattaaacaatctttttctacgtcaaaattggaaggatatacaaagcaattgccgtctccagctcctggtatatgtttaccagctggaaaagttgtttcacataccacgtttgaagtcatagaaaaatataatgtactagatgatattataaagcctttatctaaccaacctatcttcgaaggaccgtctggtgttaaatggttcgatataaaggagaaggaaaatgaacatcgggaatatagaatatacttcataaaagaaaattctatatattcgttcgatacaaaatctaaacaaactcgtagctcgcaagtcgatgcgcgactattttcagtaatggtaacttcgaaaccgttatttatagcagatatagggataggagtaggaatgccacaaatgaaaaaaatacttaaaatgtaatcttaatcgagtacaccacacgacaatgaacaaacctaagacagattatgctggttatgcttgctgcgtaatatgcggtctaattgtcggaattatttttacagcgacactattaaaagttgtagaacgtaaattagttcatacaccatcaatagataaaacgataaaagatgcatatattagagaagattgtcctactgactggataagctataataataaatgtatccatttatctactgatcgaaaaacctgggaggaaggacgtaatacatgcaaagctctaaatccaaattcggatctaattaagatagagactccaaacgagttaagttttttaagaagccttagacgaggctattgggtaggagaatccgaaatattaaaccagacaaccccatataattttatagctaaaaatgccacgaagaatggaaatatatttgtagcacaacgaatactcccaaactgcattcgtgttacactatataacaattacactacatttttatcataccactacttcggttagatgttttagaaaaaaataaatatcgccgtaccgttcttgtttttataaaaataacaattaacaattatcaaattttttctttaatattttacgtggttgaccattcttggtggtaaaataatctcttagtgttggaatggaatgctgtttaatgtttccgcactcatcgtatattttgacgtatgcagtcacatcgtttacgcaatagtcagactgtagttctatcatgcttcctacatcagaaggaggaacagttttaaagtctcttggttttaatctattgccattagttttcatgaaatcctttgttttatccacttcacattttaaataaatgtccactatacattcttctgttaattttactagatcgtcatgggtcatagaatttataggttccgtagtccatggatccaaactagcaaacttcgcgtatacggtatcgcgattagtgtatacaccaactgtatgaaaattaagaaaacagtttaatagatcaacagaaatatttaatcctccgtttgatacagatgcgccatatttatggatttcggattcacacgttgtttgtctgaggggttcgtctagcgttgcttctacgtaaacttcgattcccatatattctttattgtcagaatcgcataccgatttatcatcatacactgtttgaaaactaaatggtatacacatcaaaataataaataataacgagtacattctgcaatattgttatcgtaattggaaaaatagtgttcgagtgagttggattatgtgagtattggattgtatattttattttatattttatattttatattttgtaataagaataaaatgctaatgtcaagtttattccaatagatgtcttattaaaaaacatatataataaataacaatggctgaatggcataaaattatcgaggatatctcaaaaaataataagttcgaggatgccgccatcgttgattacaagactacaaagaatgttctagctgctattcctaacagaacatttgccaagattaatccgggtgaaattattcctctcatcactaatcgtaatattctaaaacctcttattggtcagaaatattgtattgtatatactaactctctaatggatgagaacacgtatgctatggagttgcttactgggtacgcccctgtatctccgatcgttatagcgagaactcataccgcacttatatttttgatgggtaagccaacaacatccagacgtgacgtgtatagaacgtgtagagatcacgctacccgtgtacgtgcaactggtaattaaaataaaaagtaatattcatatgtagtgtcaattttaaatgatgatgatgaaatggataatatccatattgacgatgtcaataatgccggtattggcatacagctcatcgatttttagatttcattcagaggatgtggaattatgttatgggcatttgtattttgataggatctataatgtagtaaatataaaatataatccgcatattccatatagatataattttattaatcgcacgttaaccgtagatgaactagacgataatgtcttttttacacatggttattttttaaaacacaaatatggttcacttaatcctagtttgattgtctcattatcaggaaacttaaaatataatgatatacaatgctcagtaaatgtatcgtgtctcattaaaaatttggcaacgagtacatctactatattaacatctaaacataagacttattctctacatcggtccacgtgtattactataataggatacgattctattatatggtataaagatataaatgacaagtataatgacatctatgattttactgcaatatgtatgctaatagcgtctacattgatagtgaccatatacgtgtttaaaaaaataaaaatgaactcttaattatgctatgctattagaaatggataaaatcaaaattacggttgattcaaaaattggtaatgttgttaccatatcgtataacttggaaaagataactattgatgttacaccaaaaaagaaaaggatgtattattagcgcaatcagttgctgtcgaagaggcaaaagatgtcaaggtagaagaaaaaaatattatcgatattgaagatgacgatgatatggatgtagaaagcgcgtaatactatctataaacataagtatataataaatactttttatttacggtactcttgtagtggtgataccctactcgattatttttttaaaaaaaaaatacttattctgattcttctaaccatttccgtgttcgtttgaatgccacatcgacgtcaaagataggggagtagttgaaatctagttctgcattgttggtacgcacctcaaatgtagtgttggatatcttcaacgtatagttgttgagtagtgatggttttctaaatagaattctcttcatatcattcttgcacgcgtacatttttagcatccatcttggaatcctagatccttgttctattcccaatggtttcatcaatagaagattaaacatatcgtacgaacacgatggagagtaatcgtagcaaaagtaagcatttcctttaatcttagatcccggatactggatatattttgcagccaacacgtgcatccatgcagcatttcctacatatacccggctatgtaccgcgttatcatcgactgtacgatacataatgttaccgtgttgcttacattgctcgtaaaagactttcgtcaatttgtctccttctccgtaaattccagtgggtcttaggcaacaagtatacaattttgctccattcatgattacggaattattggctttcataaccagttgctcggccatacgtttactttttgcgtatacatgtcctggtgatatatcataaagggtatgctcatggccgatgaatggatcaccgtgtttattgggtcctattgcttccatgctactagtatagatcaaatacttgattcctaggtccacacaagctgccaatatagtctgtgttccataatagtttactttcatgatttcattatcggtgtattttccaaatacatccactagagcagccgtatgaataatcagatttaccccatctagcgcttctctcaccttatcaaagtcgtttatatcacattgtatatagtttataaccttaactttcgaggttattggttgtggatcttctacaatatctatgactctgatttcttgaacatcatctgcactaattaacagttttactatatacctgcctagaaatccggcaccaccagtaaccgcgtacacggccattgctgccactcataatatcagactacttattctattttactaaataatggctgtttgtataatagaccacgataatatcagaggagttatttactttgaaccagtccatggaaaagataaagttttaggatcagttattggattaaaatccggaacgtatagtttgataattcatcgttacggagatattagtcaaggatgtgattccataggcagtccagaaatatttatcggtaacatctttgtaaacagatatggtgtagcatatgtttatttagatacagatgtaaatatatttacaattattggaaaggcgttatctatttcaaaaaatgatcagagattagcgtgtgaagttattggtatttcttacataaatgaaaagataatacattttcttacaattaacgagaatggcgtttgatatatcagttaatgcgtctaaaacaataaatgcattagtttacttttctactcagcaaaataaattagtcatacgtaatgaagttaatgatacacactacactgtcgaatttgatagggacaaagtagttgacacgtttatttcatataatagacataatgacaccatagagataagaggggtgcttccagaggaaactaatattggttgcgcggttaatacgccggttagtatgacttacttgtataataagtatagttttaaactgattttagcagaatatataagacacagaaatactatatccggcaatatttattcggcattgatgacactagatgatttggctattaaacagtatggagacattgatctattatttaatgagaaacttaaagtagactccgattcgggactatttgactttgtcaactttgtaaaggatatgatatgttgtgattctagaatagtagtagctctatctagtctagtatctaaacattgggaattgacaaataaaaagtataggtgtatggcattagccgaacatatatctgatagtattccaatatctgagctatctagactacgatacaatctatgtaagtatctacgcgggcacactgagagcatagaggatgaatttgattattttgaagacgatgattcgtctacatgttctgccgtaaccgacagggaaacggatgtataattttttttatagcgtgaaggatatgataaaaaatataattgttgtatttatcccattccaatcaccttatatgattctgtaaaaaaattatactgtaacacaataaaggagtcttatagatgtatagaggtcagatactggtttgataaactgtttattccacataagtatgtttgactttatggttagacccgcatactttaacaaatcactgaaaattggagttaggtattgacctctcagaatcagttgccgttctggaacattaaatgtattttttatgatatactccaacgcatttatgtgggcatacaacaagtcattactaatggagtattccaagagttttagttgtctagtatttaacaagagaagagatttcaacagactgtttatgaactcgaatgccgcctcattgtcgcttatattgatgatgtcgaattctcccaatatcatcaccgatgagtagctcatcttgttatcgggatccaagttttctaaagatgtcattaaaccctcgatcatgaatggatttatcatcatcgtttttatgttggacatgagcttagtccgtttgtccacatctatagacgacgatttctgaattatttcatatatccctctctttaactccaggaacttgtcaggatggtctactttaatatgttctcgtctaagagatgaaaatctttggatggttgcacgcgacttttctctaaaggatgacgttgcccaagatcctctcttaaatgaatccatcttatccttggacaagatggacagtctattttccttagatggtttaatatttttgttacccatgatctataaaggtagacctaatcgtctcggatgaccatatatttattttcagttttattatacgcataaattgtaaaaaatatgttaggtttacgaaaatgtctcgtggggcattaatcgtttttgaaggattggacaaatctggaaaaacaacacaatgtatgaacatcatggaatctataccggcaaacacgataaaatatcttaactttcctcagagatccactgtcactggaaagatgatagatgactatctaactcgtaaaaaaacctataatgatcatatagttaatctattattttgtgcaaatagatgggagtttgcatcttttatacaagaacaactagaacagggaattactttaatagttgatagatacgcattttctggagtagcgtatgccgccgctaaaggcgcgtcaatgactctcagtaagagttatgaatctggattgcctaaacccgacttagttatattcttggaatctggtagcaaagaaattaatagaaacgtcggcgaggaaatttatgaagatgttacattccaacaaaaggtattacaagaatataaaaaaatgattgaagaaggagatattcattggcaaattatttcttctgaattcgaggaagatgtaaagaaggagttgattaagaatatagttatagaggctatacacacggttactggaccagtggggcaactgtggatgtaatagtgaaattacattttttataaatagatgttagtacagtgttataaatggatgaagcatattactctggcaacttggaatcagtactcggatacgtgtccgatatgcataccgaactcgcatcaatatctcaattagttattgccaagatagaaactatagataatgatatattaaacaaggacattgtaaattttatcatgtgtagatcaaacttggataatccatttatctctttcctagatactgtatatactattatagatcaagagaactatcagactgagttgattaattcattagacgacaatgaaattatcgattgtatagttaataagtttatgagcttttataaggataacctagaaaatatagtagatgctatcatcactctaaaatatataatgaataatccagattttaaaactacgtatgccgaagtactcggttccagaatagccgatatagatattaaacaagtgatacgtaagaatatactacaattgtctaatgatatccgcgaacgatatttgtgaaaaatattaaaaaaaaatactttttttattaaatgacgtcgcttcgcgaatttagaaaattatgctgtgatatatatcacgcatcaggatataaagaaaaatctaaattaattagagactttataacagatagggatgataaatatttgatcattaagctattgcttcccggattagacgatagaatttataacatgaacgataaacaaattataaaattatatagtataatatttaaacaatctcaggaagatatgctacaagatttaggatacggatatataggagacactattaggactttcttcaaagaaaacacagaaatccgtccaagagataaaagcattttaactttagaagacgtggatagtttcttaactacgttatcatccgtaactaaagaatcgcatcaaataaaattattgactgatatcgcatccgtttgtacatgtaatgatttaaaatgtgtagtcatgcttattgataaagatctaaaaattaaagcgggtcctcggtacgtacttaacgctattagtcctaatgcctatgatgtgtttagaaaatctaataacttgaaagagataatagaaaattcatctaaacaaaatctagactctatatctatttctgttatgactccaattaatcccatgttagcggaatcgtgtgattctgtcaataaggcgtttaaaaaatttccatcaggaatgtttgcggaagtcaaatacgatggtgaaagagtacaagttcataaaaataataacgagtttgccttctttagtagaaacatgaaaccagtactctctcataaagtggattatctcaaagaatacataccgaaagcatttaaaaaagctacgtctatcgtattggattctgaaattgttcttgtagacgaacataatgtaccgctcccgtttggaagtttaggtatacacaaaaagaaagaatataaaaactctaacatgtgtttgttcgtgtttgactgtttgtactttgatggattcgatatgacggacattccattgtacgaacgaagatcttttctcaaagatgttatggttgaaatacccaatagaatagtattctcagagttgacgaatattagtaacgagtctcagttaactgacgtattggatgatgcactaacgagaaaattagaaggattggtcttaaaagatattaatggagtatacgaaccgggaaagagaagatggttaaaaataaagcgagactatttgaacgagggttccatggcagattctgccgatttagtagtactaggtgcctactatggtaaaggagcaaagggtggtatcatggcagtctttctaatgggttgttacgacgatgaatccggtaaatggaagacggtaactaaatgttccggtcacgatgataatacgttaagggttttgcaagaccaattaacgatgattaaaattaacaaggatcccaaaaaaattccagagtggttagtagttaataaaatctatattcccgattttgtagtagaggatccgaaacaatctcagatatgggaaatttcaggagcagagtttacatcttccaagtcccataccgcaaatggaatatccattagatttcctagatttactaggataagagaggataaaacgtggaaagaatctactcatctaaacgatttagtaaacttgactaaatcttaatagttacatacaaactgaaaattaaaataacaccatttagttggtggtcgccatggatggtgttattgtatactgtctaaacgcgttagtaaaacatggcgaggaaataaatcatataaaaaatgatttcatgattaaaccatgttgtgaaagagtttgtgaaaaagttaagaacgttcacattggcggacaatctaaaaacaatacagtgattgcagatttgccatatatggataatgctgtatcggatgtatgcaattcactgtataaaaagaatgtatcaagaatatccagatttgctaatttgataaagatagatgacgatgacaagactcctactggtgtatataattattttaaacctaaagatgttattcctgttatcatatctataggaaaggataaagatgtctgtgaactattaatctcatcagacatatcgtgtgcatgcgtggagttaaattcatataaagtagccattcttcccatggatgtttccttttttaccaaaggaaatgcatcattgattattctcctgtttgatttctctatcgatgcagcacctctcttaagaagtgtaaccgataataatgttattatatctagacaccagcgtctacatgacgagcttccgagttccaattggttcaagttttacataagtataaagtccgactattgttctatattatatatggttgttgatggatctgtgatgcatgcgatagctgataatagaactcacgcaattattagcaaaaatatattagacaatactacgattaacgatgagtgtagatgctgttattttgaaccacagattaggattcttgatagagatgagatgctcaatggatcatcgtgtgatatgaacagacattgtattatgatgaatttacctgatgtaggcgaatttggatctagtatgttggggaaatatgaacctgacatgattaagattgctctttcggtggctggtaatttaataagaaatcgagactacattcccgggagacgaggatatagctactacgtttacggtatagcctctagataatttttttaagcacgaaataaaaaacataattttaaaccaatctatttcatactattttgtgtgatcaccatggacataaagatagatattagtatttctggtgataaatttacggtgactactaggagggaaaatgaagaaagaaaaaaatatctacctctccaaaaagaaaaaactactgatgttatcaaacctgattatcttgagtacgatgacttgttagatagagatgagatgtctactattctagaggaatattttatgtacagaggtctattaggcctcagaataaaatatggacgactctttaacgaaattaaaaaattcgacaatgatgcggaagaacaattcggtactatagaagaactcaagcagaaacttagattaaattctgaagagggagcagataactttatagattatataaaggtacaaaaacaggatatcgtcaaacttactgtatacgattgcatatctatgataggattgtgtgcatgcgtggtagatgtttggagaaatgagaaactgttttctagatggaaatattgtttacgagctattaaactgtttattaatgatcacatgcttgataagataaaatctatactgcagaatagactagtatatgtggaaatgtcatagaaagttaaaagttaatgagagcaaaaatatataaggttgtattccatatttgttattttttctgtaatagttaaaaaaatacattcgatggtctatctatcagattattatgtgttataaggtactttttctcataataaactagagtatgagtaagatagtgtttttcaaaacatataaatctaaaattgatggatgagatatacagctattaatttcgaaaatatattttaatctgataactttaaacatggatttttgatggtggtttaacgttttaaaaaaagattttgttattgtagtatatgataatattaaaagatggatataaagaatttgctgactgcatgtactattttttacattactacattggctacggcagatatacctactccgccaccaacgggtcatgtgacaagggagaatatcttgataagaggcataatcaatgttgtaatcggtgtccacctggagaatttgccaaggttagatgtaatggtaacgataacacaaaatgtgaacgctgcccacctcatacatataccacaatcccaattattctaatggatgtcatcaatgtagaaaatgcccaacaggatcatttgataaggtaaagtgtaccggaacacagaacagtaaatgttcgtgtcttcctggttggtattgcgctactgattcttcacagactgaagattgttgaaattgtataccaaaaaggagatgtccatgcggatactttggtggaatagatgaacaaggaaatcctatttgtaaatcgtgttgtgttggtgaatattgcgactacctacgtaattatagacttgatccatttcctccatgcaaactatctaaatgtaattaattatgattttgatgataatgttaccatacattatatcgctacttggttagtgtattattcagtatgaagacctattaataattacttatcttttgacgatcttgttataattataatataaaaatacttatggcatagtaactcataattgctgacgcgataaattcgtaataatctgttttgttcaaaggaatctacaggcataaaaataaaaatataatttataatatactcttacaacgccatcatgaataacagcagtgaattgattgctgttattaatggatttagaaatagtggacgattttgtgatattaatatagttattaatgatgaaaggataaacgctcataaactcatcctatctggagcctccgaatatttttccattctgttttccaataattttatcgattctaatgaatacgaagttaatctaagtcatttagattatcaaagtgttaacgatttgatcgattacatttatgggatacctttgagcctaactaacgataacgtgaaatatattctttcaaccgctgattttttacaaattggatctgccattacggagtgtgaaaattacatacttaaaaatctttgttctaaaaactgtatcgatttctacatatacgctgataaatataataacaagaaaatagaatcagcgtcgtttaacacaatattacaaaatattttgagactcatcaacgatgaaaactttaaatacttaacagaggaatcaatgataaaaattttaagcgatgatatgttaaatataaaaaatgaggatttcgccccactaattctcattaaatggttagagagtactcaacaatcatgcaccgtcgagttacttaaatgcctcagaatatcattgctttccccacaagttataaaatcactttatagtcatcgactggttagttcaatctacgaatgtataacattcttaaacaatatagcattcttggatgaatcatttcctagataccatagcatcgagttgatatctatcggtataagtaattcgcgtgataaaatttccataaactgctacaatcataaaaaaaatacatgggaaatgatatcttcacgtagatataggtgtagtttcgcagtggccgtcctggataatattatttatatgatgggtggatatgatcagtccccgtatagaagttcaaaggttatagcgtacaatacatgtacaaattcttggatatatgatataccagagctaaaatatcctcgttctaattgtgggggactggctgatgacgaatacatttattgtataggcggcatacgcgatcaggattcatcgttgacatctagtattgataaatggaagccatcaaaaccatattggcagaagtatgctaaaatgcgcgaaccaaaatgtgatatgggggttgcgatgttaaacggattaatatatgttataggtggaatcgttaaaggtgacacgtgtaccgacgcactagagagtttatcagaagatggatggatgaagcatcaacgtcttccaataaaaatgtccaatatgtcgacgattgttcatgatggcaagatttatatatctggaggttacaacaatagtagtgtagttaatgtaatatcgaatctagtccttagctataatccgatatatgatgaatggaccaaattatcatcattaaacattcctagaattaatcccgctctatggtcagcgcataataaattatatgtaggaggaggaatatctgatgatgttcgaactaatacatctgaaacatacgataaagaaaaagattgttggacattggataatggtcacgtgttaccacgcaattatataatgtataaatgcgaaccgattaaacataaatatccattggaaaaaacacagtacacgaatgattttctaaagtatttggaaagttttataggtagttgatagaacaaaatacataattttgtaaaaataaatcactttttatactaatatgacacgattaccaatacttttgttactaatatcattagtatacgctacaccttttcctcagacatctaaaaaaataggtgatgatgcaactctatcatgtaatcgaaataatacaaatgactacgttgttatgagtgcttggtataaggagcccaattccattattcttttagctgctaaaagcgacgtcttgtattttgataattataccaaggataaaatatcttacgactctccatacgatgatctagttacaactatcacaattaaatcattgactgctagagatgccggtacttatgtatgtgcattctttatgacatcgcctacaaatgacactgataaagtagattatgaagaatactccacagagttgattgtaaatacagatagtgaatcgactatagacataatactatctggatctacacattcaccagaaactagttctgagaaacctgattatatagataattctaattgctcgtcggtattcgaaatcgcgactccggaaccaattactgataatgtagaagatcatacagacaccgtcacatacactagtgatagcattaatacagtaagtgcaacatctggagaatccacaacagacgagactccggaaccaattactgataaagaagaagatcatacagtcacagacactgtctcatacactacagtaagtacatcatctggaattgtcactactaaatcaaccaccgatgatgcggatctttatgatacgtacaatgataatgatacagtaccatcaactactgtaggtagtagtacaacctctattagtaattataaaaccaaggactttgtagaaatatttggtattaccgcattaattatattgtcggccgtggcaatattctgtattacgtattatatatgtaataaacgttcacgtaaatacaaaacagagaacaaagtctagatttttgacttacataaatgtctgggatagtaaaatctatcatattgagcggaccatctggttcaggaaagacagccatagccaaaagactatgggaatatatttggatttgtggtgtcccataccactagatttcctcgtcctatggaacgagaaggtgtcgattaccattacgttaacagagaggccatctggaagggaatagccgccggaaactttctagaacatactgagtttttaggaaatatttacggaacttctaaaactgctgtgaatacagcggctattaataatcgtatttgtgtgatggatttaaacatcgacggtgttagaagttttaaaaatacttacctaatgccttactcggtgtatataagacctacctctcttaaaatggttgagaccaagcttcgttgtagaaacactgaagctaacgatgagattcatcgtcgcgtgatattggcaaaaacggatatggatgaggccaacgaagcaggtctattcgacactattattattgaagatgatgtgaatttagcatatagtaagttaattcagatactacaggaccgtattagaatgtattttaacactaattaaagacttaagacttaaaacttgataattaataatataactcgtttttatatgtggctatttcaacgtctaatgtattagttaaatattaaaacttaccacgtaaaacttaaaatttaaaatgatatttcattgacagatagatcacacattatgaactttcaaggacttgtgttaactgacaattgcaaaaatcaatgggtcgttggaccattaataggaaaaggtggatttggtagtatttatactactaatgacaataattatgtagtaaaaatagagcccaaagctaacggatcattatttaccgaacaggcattttatactagagtacttaaaccatccgttatcgaagaatggaaaaaatctcacaatataaagcacgtaggtcttatcacgtgcaaggcatttggtctatacaaatccattaatgtggaatatagattcttggtaattaatagattaggtgtagatctagatgcggtgatcagagccaataataatagattaccaaaaaggtcggtgatgttgatcggaatcgaaatcttaaataccatacaatttatgcacgagcaaggatattctcacggagatattaaagcgagtaatatagtcttggatcaaatagataagaataaattatatctagtggattacggattggtttctaaattcatgtctaatggcgaacatgttccatttataagaaatccaaataaaatggataacggtactctagaatttacacctatagattcgcataaaggatacgttgtatctagacgtggagatctagaaacacttggatattgtatgattagatggttgggaggtatcttgccatggactaagatatctgaaacaaagaattgtgcattagtaagtgccacaaaacagaaatatgttaacaatactgcgactttgttaatgaccagtttgcaatatgcacctagagaattgctgcaatatattaccatggtaaactctttgacatattttgaggaacccaattacgacgagtttcggcacatattaatgcagggtgtatattattaagtgtggtgtttggtcgatgtaaaatttttgtcgataaaaattaaaaaataacttaatttattattgatctcgtgtgtacaaccgaaatcatggcgatgttttacgcacacgctctcggtgggtacgacgagaatcttcatgcctttcctggaatatcatcgactgttgccaatgatgtcaggaaatattctgttgtgtcagtttataataacaagtatgacattgtaaaagacaaatatatgtggtgttacagtcaggtgaacaagagatatattggagcactgctgcctatgtttgagtgcaatgaatatctacaaattggagatccgatccatgatcaagaaggaaatcaaatctctatcatcacatatcgccacaaaaactactatgctctaagcggaatcgggtacgagagtctagacttgtgtttggaaggagtagggattcatcatcacgtacttgaaacaggaaacgctgtatatggaaaagttcaacatgattattctactatcaaagagaaggccaaagaaatgagtacacttagtccaggacctataattgattaccacgtctggataggagattgtatctgtcaagttactgctgtggacgtacatggaaaggaaattatgagaatgagattcaaaaagggtgcggtgcttccgatcccaaatctggtaaaagttaaacttggggagaatgatacagaaaatctttcttctactatatcggcggcaccatcgaggtaaccacctctctggaagacagcgtgaataatgtactcatgaaacgtttggaaactatacgccatatgtggtctgttgtatatgatcattttgatattgtgaatggtaaagaatgctgttatgtgcatacgcattcatctaatcaaaatcctataccgagtactgtaaaaacaaatttgtacatgaagactatgggatcatgcattcaaatggattccatggaagctctagagtatcttagcgaactgaaggaatcaggtggatggagtcccagaccagaaatgcaggaatttgaatatccagatggagtggaagacactgaatcaattgagagattggtagaggagttcttcaatagatcagaacttcaggctggtaaattagtcaaatttggtaattctattaattgttaaacatacatctgtttcagctaagcaactaagaacacgtatacggcagcagcttcctttatactctcatcttttaccaacacaaagggtggatatttgttcattggagttgataataatacacacaaagtatttggattcacggtgggttacgactacctcagactggtagagaatgatatagaaaagcatatcaaaagactttgtgttgtgcatttctgtgagaagaaagaggacatcaagtacgcgtgtcgattcatcaaggtatataaacctggggatgaggctacctcgacatacgtgtgcgctatcaaagtggaaagatgctgttgtgctgtgtttgcagattggccagaatcatggtatatggatactaatggtatcaagaagtattctccagatgaatgggtgtcacatataaaattttaattaatgtaactatagagaacaaataataggttgtaatatcatatagacaataactaacaattaattagtaactgttatctcttttttaactaaccaactaactatatacctattaatacatcgtaattatagttcttaacatctattaatcattgattcgcttctttaattttttataaactaacattgttaattgaaaagggataacatgttacagaatataaattatatatggatttttttaaaaaggaaatacttgactggagtgtatatttatctcttcattatatagcacgcgtgtgttccaattcttccacatcccatataatacaggattataatctcattcgaacatacgagaaagtggataaaacaatagttgattttttatctaggttgccaaatttattccatattttagaatatggggaaaatattctacatatttattctatggatgatgctaatacgaatattataattttttttctagatagagtattaaatattaataagaacgggtcatttatacacaatctcaggttatcatcatccattaatataaaagaatatgtatatcaattagttaataatgatcatccagataataggataagactaatgcttgaaaatggacgtagaacaagacattttttgtcctatatatcagatacagttaatatctatatatgtattttaataaatcatggattttatatagatgccgaagacagttacggttgtacattattacatagatgtatatatcactataagaaatcagaatcagaatcatacaatgaattaattaagatattgttaaataatggatcagatgtagataaaaaagatacgtacggaaacacaccttttatcctattatgtaaacacgatatcaacaacgtggaattgtttgagatatgtttagagaatgctaatatagactctgtagactttaatagatatacacctcttcattatgtctcatgtcgtaataaatatgattttgtaaagttattaatttctaaaggagcaaatgttaatgcgcgtaataaattcggaactactccattttattgtggaattatacacggtatctcgcttataaaactatatttggaatcagacacagagttagaaatagataatgaacatatagttcgtcatttaataatttttgatgctgttgaatctttagattatctattatccagaggagttattgatattaactatcgtactatatacaacgaaacatctatttacgacgctgtcagttataatgcgtataatacgttggtctatctattaaacagaaatggtgattttgagacgattactactagtggatgtacatgtatttcggaagcagtcgcaaacaacaacaaaataataatggaagtactattgtctaaacgaccatctttgaaaattatgatacagtctatgatagcaattactaaaaataaacaacataatgcagatttattgaaaatgtgtataaaatatactgcgtgtatgaccgattatgatactcttatagatgtacagtcgctacagcaatataaatggtatattttaaaatgtttcgatgaaatagatatcatgaagagatgttatataaaaaataaaactgtattccaattagttttttgtatcaaagacattaatactttaatgagatacggtaaacatccttctttcgtgaagtgcactagtctcgacgtatacggaagtcgtgtacgtaatatcatagcatctattagatatcgtcagagattaattagtctattatccaagaagctggatgcgggagataaatggtcgtgttttcctaacgaaataaaatataaaatattggaaaactttaacgataacgaactgtccacatatctaaaaatcttataaacactattaaaatataaaatctaagtaggataaaatcacactacatcattgtttccttttagtgctcgacagtgtatactatttttaacactcataaataaaaatgaaaacgatttccgttgttacgttgttatgcgtactacctgctgttgtttattcaacatgtactgtacccactatgaataacgctaaattaacgtctaccgaaacatcgtttaataataaccagaaagttacgtttacatgtgatcagggatatcattcttcggatccaaatgctgtctgcgaaacagataaatggaaatacgaaaatccatgcaaaaaaatgtgcacagtttctgattacatctctgaactatataataaaccgctatacgaagtgaattccaccatgacactaagttgcaacggcgaaacaaaatattttcgttgcgaagaaaaaaatggaaatacttcttggaatgatactgttacgtgtcctaatgcggaatgtcaacctcttcaattagaacacggatcgtgtcaaccagttaaagaaaaatactcatttggggaatatatgactatcaactgtgatgttggatatgaggttattggtgcttcgtacataagttgtacagctaattcttggaatgttattccatcatgtcaacaaaaatgtgatataccgtctctatctaatggattaatttccggatctacattttctatcggtggcgttatacatcttagttgtaaaagtggttttatactaacgggatctccatcatccacatgtatcgacggtaaatggaatcccgtactcccaatatgtgtacgaactaacgaagaatttgatccagtggatgatggtcccgacgatgagacagatttgagcaaactctcgaaagacgttgtacaatatgaacaagaaatagaatcgttagaagcaacttatcatataatcatagtggcgttaacaattatgggcgtcatatttttaatctccgttatagtattagtttgttcctgtgacaaaaataatgaccaatataagttccataaattgctaccgtaaatataaatccgttaaaataattaataattaataattaataattaataacgaacaagtatcaaaagattaaagacttatagctagaatcaattgagatgtcttcttcagtggatgttgatatctacgatgccgttagagcatttttactcaggcactattataacaagagatttattgtgtatggaagaagtaacgccatattacataatatatacaggctatttacaagatgcgccgttataccgttcgatgatatagtacgtactatgccaaatgaatcacgtgttaaacaatgggtgatggatacacttaatggtataatgatgaatgaacgcgatgtttctgtaagcgttggcaccggaatactattcatggaaatgtttttcgattacaataaaaatagtatcaacaatcaactaatgtatgatataattaatagcgtatctataattctagctaatgagagatatagaagcgcttttaacgacgatggtatatacatccgtagaaatatgattaacaagttgtacggatacgcatctctaactactattggcacgatcgctggaggtgtttgttattatctgttgatgcatctagttagtttgtataaataattatttcaatatactagttaaaattttaagattttaaatgtataaaaaactaataacgtttttatttgtaataggtgcattagcatcctattcgaataatgagtacactccgtttaataaactgagtgtaaaactctatatagatggagtagataatatagaaaattcatatactgatgataataatgaattggtgttaaattttaaagagtacacaatttctattattacagagtcatgcgacgtcggatttgattccatagatatagatgttataaacgactataaaattattgatatgtataccattgactcgtctactattcaacgcagaggtcacacgtgtagaatatctaccaaattatcatgccattatgataagtacccttatattcacaaatatgatggtgatgagcgacaatattctattactgcagagggaaaatgctataaaggaataaaatatgaaataagtatgatcaacgatgatactctattgagaaaacatactcttaaaattggatctacttatatatttgatcgtcatggacatagtaatacatattattcaaaatatgatttttaaaaatttaaaatatattatcacttcagtgacagtagtcaaataacaagctggccgcataacttcgtataatgtatgctatacgaagttatgtcgacgatgttcccaatttcaaggacaaaatggccagagttatcaagagaaaatttaataaacagtctcaatcttatttaactaaatttctcggtagcacatcaaatgatgttaccacttttcttagcatgcttaacttgactaaatattcataactaatttttattaatgatacaaaaacgaaataaaactgcatattatacactggttaacgcccttataggctctaaccattttcaagatgaggtccctgattatagtccttctgttcccctctatcatctactccatgtctattagacgatgtgagaagactgaagaggaaacatggggattgaaaatagggttgtgtataattgccaaagatttctatcccgaaagaactgattgcagtgttcatctcccaactgcaagtgaaggattgataactgaaggcaatggattcagggatatacgaaacaccgataaattataaaaaaagcaatgtgtccgctgtttccgttaataatactattttcgtaactggcggattattcataaataactctaatagcacgatcgtggttaacaatatggaaaaacttgacatttataaagacaaacaatggtcgattatagaaatgcctatggctagggtatatcacggcatcgactcgacatttggaatgttatattttgccggaggtctatccgttaccgaacaatatggtaatttagagaaaaacaacgagatatcttgttacaatcctagaacgaataagtggtttgatatttcatatactatttataagatatccatatcatcattgtgtaaactaaataacgtcttctatgtatttagtaaggacattggatatgtggaaaagtatgatggtgcatggaagttagtacatgatcgtctccccgctataaaggcattatcaacttctccttattgattgaaaatgaaaatataaatagtttttatgtatagcagtattaccctatagttttattgcttactactaacatggatacagatacagatacagatacagatacagatacagatacagatacagatacagatgttacaaatgtagaagatatcataaatgaaatagatagagagaaagaagaaatactaaaaaatgtagaaattgaaaataataaaaacattaacaagaatcatccaagtggatatattagagaagcactcgttattaatacaagtagtaatagtgattccattgataaagaagttatagaatgtatcagtcacgatgtaggaatatagatcatatctactaatttttataatcaatacaaaacataaaaaacaactcgttattacatagcaggcatggaatccttcaagtattgttttgataacgatggcaagaaatggattatcggaaatactttatattctggtaattcaatactctataaggtcagaaaaaatttcactagttcgttctacaattacgtaatgaagatagatcacaaatcacacaagccattgttgtctgaaatacgattctatatatctgtattggatcctttgactatcgacaactggacacgggaacgtggtataaagtatttggctattccagatctgtatggaattggagaaaccgatgattatatgttcttcgttataaagaatttgggaagagtattcgccccaaaggatactgaatcagtcttcgaagcatgtgtcactatgataaacacgttagagtttatacactctcgaggatttacccatggaaaaatagaaccgaggaatatactgattagaaataaacgtctttcactaattgactattctagaactaacaaactatacaagagtggaaactcacatatagattacaacgaggacatgataacttcaggaaatatcaattatatgtgtgtagacaatcatcttggagcaacagtttcaagacgaggagatttagaaatgttgggatattgcatgatagaatggttcggtggcaaacttccatggaaaaacgaaagtagtataaaagtaataaaacaaaaaaaagaatataaaaaatttatagctactttctttgaggactgttttcctgaaggaaatgaacctctggaattagttagatatatagaattagtatacacgttagattattctcaaactcctaattatgacagactacgtagactgtttatacaagattgaaattatattctttttttatagagtgtggtagtgttacggatatctaatattaatattagactatctctatcgcgctacacgaccaatatcgattactatgaatatcttctatgaaaggagagaatgtattcatttctccagcgtcaatctcgtcagtattgacaatactgtattatggagctaatggatccactgctgaacagctatcaaaatatgtagaaacggaggagaacacggataaggttagcgctcagaatatctcattcaaatccataaataaagtatatgggcgatattctgccgtgtttaaagatttctttttgggaaaaattggcgataagtttcaaactgttgacttcactgattgtcgcactatagatgcaatcaacaagtgtgtagatatctttactgaggggaaaatcaatccactattggatgaaccattgtctcctagcaattagtgccgtatactttaaagcaaaatggttgacgccattcgaaaaggaatttaccagtgattatcccttttacgtatcaccaacggaaatggtagatgtaagtatgatgtctatgtacggcgagctatttaatcacgcatctgtaaaggaatcattcggcaacttttcaatcatagaactgccatatgttggagatactagtatgatggtcattcttccagacaagattgatggattagaatccatagaacaaaatctaacagatacaaattttaagaaatggtgtaactctctggatgctatgtttatagatgttcacattcccaagtttaaggtaacaggctcgtataatctggtggatactctagtaaaatccgctgatggaaacacagtgaatgctagattgtccagcgtgtccccaggacaaggtaaggactctcccgcgatcactcgtgaagaagctctggctatgatcaaagactgtgaggtgtctatcgacatcagatgtagcgaagaagagaaagacagcgacatcaagacccatccagtactcgggtctaacatctctcataagaaagtgagttacgaagatatcatcggttcaacgatcgtcgatacaaaatgtgtcaagaatctagagtttagcgttcgtatcggagacatgtgcaaggaatcatctgaacttgaggtcaaggatggattcaagtatgtcgacggatcggcatctgaaggtgcaaccgatgatacttcactcatcgattcaacaaaactcaaagcgtgtgtctga

SEQ ID NO: 17 - DNA, 158753 bp, synthetic construct
  misc_feature 1..158753: note = SKV-K5 recombinant virus
  source 1..158753: mol_type = other DNA
tcagacacacgctttgagttttgttgaatcgatgagtgaagtatcatcggttgcaccttcagatgccgatccgtcgacatacttgaatccatccttgacctcaagttcagatgattccttgcacatgtctccgatacgaacgctaaactctagattcttgacacattttgtatcgacgatcgttgaaccgatgatatcttcgtaactcactttcttatgagagatgttagacccgagtactggatgggtcttgatgtcgctgtctttctcttcttcgctacatctgatgtcgatagacacctcacagtctttgatcatagccagagcttcttcacgagtgatcgcgggagagtccttaccttgtcctggggacacgctggacaatctagcattcactgtgtttccatcagcggattctgagatggatttaatctgaggacatttggtgaatccaaagttcattctcagacctccaccgatgatggagtaataagtggtaggaggatctacatcctcgactgatgtggaatcatcttctgattccacctcgggatctggatctgactcggactctgtaatttccgttacggattggcaaatcttatcattggtcggtgtttggtcttgctttgtgactttgataataacatcgattcccatatgatgtttgttttcttcttccgtacacgaggaggaggatgaggatgattgctgaagactggcaggcacatgcatgccaggacgatatattgtttcataattgctattgattgagtactgttctttatgattctacttccttaccatgcaataaattagaatatattttctacttttacgagaaattaattattgtatttattatttatgggtgaaaaacttactataaaaagcgggtgggtttggaattagtgatcagtttatgtatatcgcaactaccgggcatatggctatcgacatcgagaacattacccacatgataagagattgtatcagtttcgtagtcttgagtattggtattactatatagtatatagatgtcgacgctagatatacagtctccgaatgcggcatgataccgtcatcattctttgctttcgttaactgtttggaggaagaatctttgttattgcatttaatctcgaaattcagagtgcacacctttctcctgtaaagaatcctgaagtcgctaccttattaagaacggagaagtatccatcacgaaatacgggattacagtctttatgattcatagtaatagttagttccgacgttgagatggattcactgagaccggtagtggtcgtccgagtacacgacgtgtcgttgacgggatacagattaatttccacatcgatatagttaaaggtatttctgggtacgggttcgcatttatctgcggaagagacggtgtgagaatatgttccgagaccacacggagaacagatgacgtctccggatactccgtatcctattccacattttgtttgggaaacacatgccttgcatccggatgatcctttgagaagacaataatatccgggagagcattcacagattctattgtgagtagtgttacacgatcgcgtcttccgttacaacttagacaagcgggtaaatgattattgcgagatgtgaaggtacccgaaccacacggcgtacattgtgtgttagtcttgctatcgcataatctggaagcgtatgttcccggacacaaattatggcgtttgtattcgttgtctttacactttccatcggatggtgcatgcggtgctatatctcttccgtttattattatacatgagagaaacaatatatacgagtataatacggacttcataatttaataatgtagtaatcgttgtcgtgttcctgtttcctacttctccaatcatatagatattttctttctatcatggataatatttgtaatggttctttccgtacaacatactgtttagatgatattgcgcataatttccggaggcaaatacgatagtctagattgaccgatggtagactctaatttattgagtgctttgtcgacgagtttacttttacgctccatcgatagatggcactgttctatgagatcgtcgtacatgggaaatgaaatgtgtctgtccgaatgtatggcttcaagatagctgtgataccgtatacaggtcggtgtcggagattcgaatctctttgaggcgacttatgtcacgatgatggaatctatcttatcgaatgatatatttttcataaatacacttttatagtcctcgtttaaacagaatttactatgtagttccgcgaatgactcgtcccttaataggcagtaggctagtatcttttttacgtagtaatcgtcgtagggagagaattctgacatcttgtagaacaacgatttaatcataggtagagatactttcagtctgtggtggatgatgtcattcacaacatccgccttgtatatgatgtttctgttttcaaacaccaagtcgaataccgtctttagtcggaaggttgatgtcgtatccgatgtatgaggcaacattgttgttacaattttgaaaggcggtattatagtattcgtctttctgaatgtcgaacctatctagtagataccgtagtatattgagagtgtatccttgattatgttttatgaatagataaagtagatgttgtccttcttccttttgttcgtgccaattgagtaacattatgagaatatgacctgttgcacaatcgttccatgatgggtgtacaatcaagattattacgtatcctcgagataaaagagcatacaccacacgaggactatgtttggtatactgttgaaggtaagtgtgtaaccgcgttaatgtttgctccataatctattatcgcgtagatgaatcgcttctcggctcgcatcttagtgtgacttaacttgtaataattgcttttgtagaacgtggatatgtgtttacagtagtaatgaagagaagtgagttcatcctcgtcggcgcaattagggtcggatcctttgtacagaacgtagtagtttaagctcccattgaatttatatctaagataacacagcaatagatcggatgatttactaaagtcatcaatggtgtccgttagtatatcaaagatcttgttatcgattgatagtgaatgaatcagatagtggtgtcctttttcatccttgctatcaaagttacgcatgccgtggtgtaacaatatctttaatacagatggattaaatcgtgtattcatcgtatagcaatgtaatggagagttacctcgtttattcagatcgcagtgtttaataactagcttaaacagatgagacgatgtatccacatcaaagaacgtaaaatacatatgacaaacattgttgacagaaacgtgaccttcattcttaccgtcgtccataaatacgttaggtatgtaccacatactgtcgcgaacgatgctcacaatctcgtccatctcgcccatctcatacatttcatcatttactttttcataattagagatgtacgaaagaaaaagaaaaagaaaaagaaaaacagaacaatatatttttttagtaatgtttatgcgagacatataaaataaactccgtgtttatgatgccggtaaatgtttttatcatcttggacggaatcgattttgtaatatgtcatggaaacaaatgaaacaggacattatcactccatgataaattatttaatggagtaataaagtatctccatgggtaatttcgaaatcaagttatcgtctgtattaatgttgtccactatggagtcgatcctctcactgttctttacagtttctgtaatgatggacgttagttcttttttgtaccatttgatgtcggattctttgcgtatctcagtctgtggcgtttgcttcgtttaaataatatatcaaacatggagacgcctgatatgtaggcattcttcattctattaatgtctactctatagcgctttagttccttatgatgaccggcgatatcatacttactttagaaggaaaatcatcatctaggattaaggcgtatctgatacaggcgaataatggttcaggatatagatagcgtatatctctattaaatgcgtcaatcatagtctctagagtgggatggtagctaagtaataaatcaactatcctcgttttgttttctctttggtaactgcttttctggatggccgtattgattatcgagcgtgatgttgtaacactcgctccatattccaataaccgctttgcaaattgtatattattgacatcgaccgcgtaatatagtagagttttattctcattatcgatcatatctatatcatccatgtacttgcttagtatatcaaatacatctattagtatggtttcataacagtgatacccgcaattattaaatctcgataatatcagaccgtacatacatagacggccattgttagatatgtgatttacagccgcgtgtccatattttccacgataaaccttacgacgtttacatcgacgagattattattaacaaagtagtcgtgcagaggatagttgttgtccgttatctaacatgcatcgaacgaccatatcgccgtaatgtaagtagtttatcaacatggcttgtacgatggattcatcctgttgtctaaatctctttagaatgttatcgatgatgtagtggttatattctctggaatcgtacgaagtaatactacgcattacgtcgacaagagtatgacgtctctcaataagaagattaacgatttccatgtctacattatatggggttactctaaatcgcttgtttagataatacgcctctaatatagggctgacgtcgtatactctacacgtgtccacatcctttattaataataatttaacaatctctatatctatggttgagaaagaccagtagtattggatgggtaaagatcctccttcgtctctgccatggatggaaacattgttattgatcaaacatttaattacatccttggatagagattgagattctctatgagacgatatatagtaatgaagagagttcttacacatatcactgttgtacatacaggtacgaaatacgtaaccggtgctgtaacattctgatttaagaagccatagcaatacttctggtctcggattaggcgtcgttacgtatatatccaccaatccgagaccattgattgcataattcgtattcttggacggacgtatccgtttatccacaattaggtattttagcagacgtaagtcgatattatccgaagacagatcgaaatcatttatattcgacttgagttcgttagaggaattcgaatagctggatatcagtagatgcacaatctgagattttacgtatctatgcttactgtatgctcctagcggagttaatccttcgttgtttctacaaagtctctcgactccgcgagagagtaacagtcgaacaatcttaatgtctgtatcgcatttattggagacgtaacaatgtagcgcattgtttcctcgtctatctatatgttttgataagttgtgacacgtttcaatctctagttttatttttttgtacgtcacatcttcatccagtagacgacatagaatagtgcactctctaccacaataatccatagctattctggtgctaattattcctatttcacgaaaaatgatgaaggcaatcattcctcataagatgataaaaagtgtagtgagagagcatgaaggagatttagtatttagcagtgcggatatgatccaagagggtgagatagtcgttctcgttcagaatctttcgcagcataagtagtatgtcgatatacttatcgttgaagactcttccagagacgatagctgattgagtacaaagtccaatgattgcacgaagttcttcggcggttttcatggagtcatttctgatgaaacatttaatgatctccacgcaattgtcgatattgtcccacggaagtgaatccttcaactcaccaccaaagagctccgttgcatcagttctgaaagagatgagaagcctgtagagagaccctgcgctttctctatgggtccatctatgagaaacccacaggatgtattcagtcagacaatgtctgacgtcggccacggtattcagggagtccttagtagcgtggcaatgacagggtctgaactgggcacaaggaaaggccattgtaaaggtagacctgtagccgtttatgctaatagagggctttaatttccatttttttaatgggttgtggatgaggaatgagagtgatatcatattgagatacgtagttatgtagaggtgtatttcctatattatttactttcggtttcatattttaccaactctttaataaatttcttttcacgatgcatcttattgaatgacgttttctcataagtggacatatagatgcagaagtaatgaagaaaagtattacctctatcatctacataattagggtctgctcctttttttaacaacttatacagtacgtagtagtagtttatcggttttaaatcaagtctagaatatatagtggattaatatatttttatattagctaaagctatctatactatcagaaagcatatcattctcaacttcatcatgagttaaatatttgtgtaatggatgtcatgaacattaaacgtattcatgacatactcctttaataggttttttaaaacagatgattcaaatccttcattcattagataacagtgtaacggagtcgtaccttctactagtttgtttatatcacagcattctacaaacagtctaaacaatagagaagacggacagactttaacgtataaatgacacatgttatcgatattcgttgatgaattattattaaacgtagttatgataaatgattctaacgacatctctcgctagagataaaatctagtatcgtatcattaaacatctttgcatcatactcgcatagcatagtttttcataattaatacaatatttaaaagacttattcggaaagtattttaatacatgtatcatcgatggagatccatatgaggagtcacttgtagttcttcagtagtaataacagtgctatcatcgatagtataattatatgtagaaggttcatatgttgttgtaattggagtaactgttggtagttcttccgtggaatcaataattatactaacagcaatagtataattatataaatatgttccgttgatatcacatattttaatgaactcatttctaacaccctcagctatatctgtccaattaaatgtagccaacaatctactacgttctctttgattgactacttgtacggtagcgacgctacactatctttattgtcttctacatgctccaattgaatgtcatgatacaacgcagtttttcttatgcatgtttcataacaccacgaacatgtcgcagtaagatatatagccagagataatttctgtaaattcatgattgccggtcataaacaagcccgtcaataattgtggctatatattcagtttatagagcaaaataattaagcacaatagcgcttaatctcaaaatatgttatgtttatttttttcatattaaacatactggttaaaatcctctaaaggctgatcttcatctataaatcaagatcataattacatttagacagtggtttcatgtttataaaaatgttctttttgtgtgaataaggaatatactaatcaataatcaaccatcgaccccattacgatagtatgcaggcaaccccccattagagaggtacgtgtaatcagtctctccagttttagtatttttataagtcattgttacataaacggcttttaaacagtctcctcgataataagccatatctggaaatttattaaatactcgagtcattttacgcacggtcaaaaaagtaagtaatgtcgacgacttcttacattctatagaaacacctagaatactcattttcttttggaaaatatcctcagactctgatttgaacaatgcacgacctatagtaaaccgtgaccaataagttatattagtcaatggtatatccaaaccatcaggtgtggatagtccagtctttggtatcgatagtgtagttattgaactgagaagttaccgtatagtctttttggtcatctctaaacaaggaaactaatacctctacactattgaacgatttatcttccgtaatgggtggactagcgatggatgaagtcacgaatataagacacgctattaatccgtatatcatcattttgatattacttataataacgatttgtttaatttttagtttatactattaattgtaaatgatattattatttttttaagtattatcagctttagtttatactattactatttgtaatatttagacatagataaacgtgataaaagtctatttgtttatatttattgcggatagcagtatttccctataaaaagtatacgtcctgtggtgtctttaatcatgtacatgaatggatggtttatgtagaccttcgtacgatataccatcgaaaagttaatcgtaaatactcctgtaacggccgatgcttctgtatactcctcattaacatctataaacgtcgtatgtagaaatttttctacagtgatagtttcattacacatcttgctaaaatctgcataatatccgaatatattagtaagtcctaaattttctaaaatcggtaccagattatacggttctgtcatttccactttaaactttggcatatacaagtctatacttttagtagataacataccacaccattttttaaatttttcatctgttatatttttttctatgttatatataccttctatgtcgtccggtagtataatcaccatactagagtttccctcgtatggaatatcgataatagagaatcctccgaataattcattaatatgtacatattgcaagttattctcggtacccaccatcatatcaacactggtaactatattcttagaaatataaaacttgtctgtatatgtaagatgtttagaaaatggatatttccacattgctttaaaatggacggcgctaacaactgtcatacgagtattaatggatagcggactagtcaataaggaattaattttaccatttgtcattgtcttaacccattcgttgattagttcctttgtttggttagcattattaaagtttacagtttgaaaatcgtcttttattttttgtaggaaggaggcgtggaactcgatactatcgctaccgtatattttatttgcggtagctagtgtcgcacaatacggaatatctacgtccatgtcattattgtcatcgggtgtattctcattcatattctctatatattttgatagttgttcagctgtagaaccagctgctccatgatttagaatagataaagtagataaaatagaaactggagaaatcaaaacattttcatcagggtgttttacgattagttctttaaagatatccatggtatagaccaaacaataacgataacgatatatatcataaataaataatgttaaatttcagtttatgtttgtaccccgtattcatacttaacaaattggtattgcgtacacaatcaatcatattacataccattaataatgcaagcataaaaaatcgttagtagatgtttctaaatataggttccgtaagcaaagaatataagaatgaagcggtaatgataaaatcaatcgttatctaaaatgatcatactcatttattttattctattatattaacacatacatttttaacagcaacacattcaatattgtattgttatttttatattatttacacaattaacaatatattattagtttatattactgaattaataatataaaattcccaatcttgttataaacacacactgagaaacagcataaacacagaatccatcaaaaatgtcgatgaaatatctgatgttgttgttcgctgctatgataatcagatcattcgccgatagtggtaacgctatcgaaacgacattgccagaaattacaaacgctacaacagatattccagctatcagattatgcggtccagagggagatggatattgtttacacggtgactgtatccacgctagagatatcgacggtatgtattgtagatgctctcatggttatacaggcattagatgtcagcatgtagtattagtagactatcaacgttcagaaaacccaaacactacaacgtcatatatcccatctcccggtattatgcttgtattagtaggcattattattattattacgtgttgtctattatctgtttataggttcactcgaagaactaataaactacctctacaagatatggttgtgccataatttttataaattttttttatgagtatttttacaaaaatgtataaagtgtatgtcttatgtatatttataaaaatgctaaatatgcgatgtatctatgttatttgtatttatctaaacaatacctctacctctagatattatacaaaaattttttatttcagcatattaaagtaaaatctagttaccttgaaaatgaatacagtgggtggttccgtatcaccagtaagaacataatagtcgaatacagtatccgattgagattttgcatacaatactagtctagaaagaaatttgtaatcatcttctgtgacgggagtccatatatctgtatcatcgtctagtttatcagtgtcccatgctatattcctgttatcatcattagttaatgaaaataactctcgtgcttcagaaaagtcaaatattgtatccatacatacatctccaaaactatcgcttatacgtttatctttaacgatacctatacctagatggttatttactaacagacattttccagatctattgactataactcctatagtttccacatcaaccaagtaatgatcatctattgttatataacaataacataactcttttccgtttttatcagtatgtatatctatattaacgtcgtcgttgtagtgaatagtagttattgatctattatatgaaacggatatgtctagaacggcaattgttttacgtccagttaacactttctttgatttaaagtctagagtctttgcaaacataatatccttatccgactttatatttcctgtagggtggtataattttattttgcctccacatatcggtgtttccaaatatattactagacaatattccatatagttattagttaagggtacccaattagaacacgtacgcttattatcatcatttggatcgtatttcataaaagttattgtactatcgatgtcaacacattctacattttttaatcgtctatatagtatttttctgatattttctataatatcagaattgtcttccatcggaagttgtatactatcagaatcagttacatgtttaaataattctctgatgtcattccttatacaatcaaattcattattaaacagtttaatagtctgtagacctttatcgtcgtaaatatccattgtcttattagttacgcttatttttatgtgtttttacgttgctttattatattttataagaatgattgtttgacgaatcacgagaactattaagacatatattattagaggtatatattataaaaaagtttttgattacgatgttataagaggaaagaggacacattaacatcatacatcaattaactacattcttataacatcgtaatcaaaagaattgcaattttgatgtataacaactgtcaatgggttatggaattgtatattacatattatacggtatgttggtaacgacaaataccgatcggtaattgtctgccggtgtaatagaattatatatatctatctattacaccggctgagtacctacactattatatgattatagtttctatttttacagtaccttaactaaagtctctagtcacaagagcaatactaccaacctacactattatatgattatagtttctatttttataggaacgcgtacgagaaaatcaaatgtctaatttctaacggtagtgttgataaacgattatcgtcaatggatacctcctctatcatgtcgtctattttcttactttgttctattaacttattagcattatatattatttgattataaaacttatattgcttattagcccaatctgtaaatatcggattattaacatatcgtttctttgtaggtttatttaacatgtacatcactgtaagcatgtccgtaccatttattttaatttgacgcatatccgcaatttctttttcgcagtcggttataaattctatatatgatggatacatgctacatgtgtacttataatcgactaatatgaagtacttgatacatattttcagtaacgatttattattaccacctatgaataagtacctgtgatcgtctaggtaatcaactgttttcttaatacattcgatggttggtaatttactcagaataatttccaatatcttaatatataattctgctatttctggaatatatttatctgccagtataacacaaatagtaatacatgtaaacccatattttgttattatattaatgtctgcgccattatctattaaccattctactaggctgacactatgcgacttaatacaatgataaagtatactacatccatgtttatctattttgtttatatcatcaatatacggcttacaaagttttagtatcgataacacatccaactcacgcatagagaaggtagggaataatggcataatatttattaggttatcatcattgtcattatctacaactaagtttccattttttaaaatatactcgacaactttaggatctctattgccaaatttttgaaaatatttatttatatgcttaaatctatataatgtagctccttcatcaatcatacatttaataacattgatgtatactgtatgataagatacatattctaacaatagatcttgtatagaaactgtatatcttttaagaattgtggatattaggatattattacgtaaactattacacaattctaaaatataaaacgtatcacggtcgaataatagttgatcaactatataattatcgattttgtgatttttcttcctaaactgtttacgtaaatagttagatagaatattcattagttcatgaccactatagttactatcgaataacgcgtcaaatatttcccgtttaatatcgcatttgtcaagataataatagagtgtggtatgttcacgataagtataataacgcatctcttttttgtgtgaaattaaatagtttattacgtccaaagatgtagcataaccatcttgtgacctagtaataatataataatagagaactgttttacccattctatcatcataatcagtggtgtagtcgtaatcgtaatcgtctaattcatcatcccaattataatattcaccagcacgtctaatctgttctattttgatcttgtatccatactgtatgttgctacatgtaggtattcctttatccaataatagtttaaacacatctacattgggatttgatgttgtagcgtatttctctacaatattaataccatttttgatactatttatttctatacctttcgaaattagtaatttcaataagtctatatcgatgttatcagaacatagatattcgaatatatcaaaatcattgatatttttatagtcgactgacgacaataacaaaatcacaacatcgtttttgatattattatttttcttggtaacgtatgcctttaatggagtttcaccatcatactcatataatggatttgcaccactttctatcaatgattgtgcactgctggcatcgatgttaaatgttttacaactatcatagagtatcttatcgttaaccatgattggttgttgatgctatcgcattttttggtttctttcatttcagttatgtatggatttagcacgtttgggaagcatgagctcatatgatttcagtactgtagtgtcagtactattagtttcgatcagatcaatgtctagatctatagaatcaaaacacgataggtcagaagataatgaatatctgtacgcttctttttgtactgtaacttctcgttttgttagatgtttgcatcgtgctttaacatcaatggtacaaattttatcctcgctttgtgtatcatattcgtccctactataaaattgtatattcagattatcatgagatgtgtatacgctaacggtatcaataaacggagcacaccatttagtcataaccgtaatccaaaaatttttaaagtatatcttaacgaaagaagttgtatcatcgttaggatttggtaaatcattatctacagtgtatggtactagatcctcataagtgtatatatctagagtaatgtttaatttatcaaatggttgataatatggatcctcatgacaatttccgaagatggaaatgagatatagacatgcaataaatctaatcgaagacatggttactccttaaaaaaatacgaataatcaccttggctatttagtaagtgtcatttaacactatactcatattaatccatggactcataatctctatacgggattaacggatgttctatatacggggatgagtagttctcttctttaactttatactttttactaatcatatttagactgatgtatgggtaatagtgtttgaagagctcgttctcatcatcagaataaatcaatatctctgtttttttgttatacagatgtattacagcctcatatattacgtaatagaacgtgtcatctaccttattaactttcaccgcatagttgtttgcaaatacggttaatcctttgacctcgtcgatttccgaccaatctgggcgtataatgaatctaaactttaatttcttgtaatcattcgaaataatttttagtttgcatccgtagttatcccctttatgtaactgtaaatttctcaacgcgatatctccattaataatgatgtcgaattcgtgctgtatacccatactgaatggatgaacgaataccgacggcgttaatagtaatttactttttcatctttacatattgggtactagttttactatcataagtttataaattccacaagctactatggaataagccaaccatcttagtataacacacatgtcttaaagtttattaattaattacatgttgttttatatatcgctacgaatttaaacagagaaatcagtttaggaaaaaaaattatctatctacatcatcacgtctctgtattctacgatagagtgctactttaagatgagacatatccgtgtcatcaaaaatatactccattaaaatgattattccggcagcgaacttgatattggatatatcacaacctttgttaatatctacgacaatagacagcagtcccatggttccataaacagtgagtttatctttctttgaagagatattttgtagagatcttataaaactgtcgaatgacatcgcatttatatctttagctaaatcgtatatgttaccatcgtaatatctaaccgcgtctatcttaaacgtttccatcgctttaaagacgtttccgatagatggtctcatttcatcagtcatactgagccaacaaatataatcgtgtataacatctttgatagaatcagactctaaagaaaacgaatcggctttattatacgcattcatgataaacttaatgaaaaatgtttttcgttgtttaagttggatgaatagtatgtcttaataattgttattatttcattaattaatatttagtaacgagtacactctataaaaacgagaatgacataactagttatcaaagtgtctaggacgcgtaattttcatatggtatagatcctgtaagcattgtctgtattctggagctattttctctatcgcattagtgagttcagaatatgttataaatttaaatcgaataacgaacataactttagtaaagtcgtctatattaactcttttattttctagccatcgtaataccatgtttaagatagtatattctctagttactacgatctcatcgttgtctagaatatcacatactgaatctacatccaattttagaaattggtctgtgttacatatctcttctatattattgttgatgtattgtcgtagaaaactattacgtagaccattttctttataaaacgaatatatagtactccaattatctttaccgatatatttgcacacataatccattctctcaatcactacatctttaagattttcgttgttaagatatttggctaaactatataattctattagatcatcaacagaatcagtatatatttttctagatccaaagacgaactctttggcgtcctctataatattcccagaaaagatattttcgtgttttagtttatcgagatctgatctgttcatatacgccatgattgtacggtacgttatgataaccgcataaaataaaaatccattttcatttttaaccaatactattcataattgagattgatgtaatactttgttactttgaacgtaaagacagtacacggatccgtatctccaacaagcacgtagtaatcaaatttggtgttgttaaacttcgcaatattcatcaatttagatagaaacttatactcatcatctgttttaggaatccatgtattattaccactttccaacttatcattatcccaggctatgtttcgtccatcatcgttgcgcagagtgaataattcttttgtattcggtagttcaaatatatgatccatgcatagatcggcaaagctattgtagatgtgatttttcctaaatctaatataaaactcgtttactagcaaacactttcctgatttatcgaccaagacacatatggtttctaaatctatcaagtggtggggatccatagttatgacgcagtaacatatattattacattcttgactgtcgctaatatctaaatatttattgttatcgtattggattctgcatatagatggcttgtatgtcaaagatatagaacacataaccaatttatagtcgcgctttacattctcgaatctaaagttaagagatttagaaaacattatatcctcggatgatgttatcactgtttctggagtaggatatattaaagtctttacagatttcgtccgattcaaataaatcactaaataatatcccacattatcatctgttagagtagtatcattaaatctattatattttatgaaagatatatcactgctcacctctatatttcgtacatttttaaactgtttgtataatatctctctgatacaatcagatatatctattgtgtcggtagacgataccgttacatttgaattaatggtgttccattttacaacttttaacaagttgaccaattcatttctaatagtatcaaactctccatgattaaatattttaatagtatccattttatatcactacggacacaaagtagctgacataaaccattgtataatttttatgttttatgtttattagcgtacacattttggaagttccggcttccatgtatttcctggagagcaagtagatgatgaggaaccagatagtttatatccgtacttgcacttaaagtctacattgtcgttgtatgagtatgatcttttaaacccgctagacaagtatccgtttgatattgtaggatgtggacatttaacaatctgacacgtgggtggatcggaccattctcctcctgaacacaggacaccagagttaccaatcaacgaatatccactattgcaactataagttacaacgcttccatcggtataaaaatcctcgtatccgttatgtcttccgttggatatagatggaggggattggcatttaacagattcacaaataggtgcctcgggattccataccatagatccagtagatcctaattcacaatacgatttagattcaccgatcaaatgatatccgctattacaagagtacgttatactagagccaaagtctactccaccaatatcaagttggccattatcgatatctcgaggcgatgggcatctccgtttaatacattgattaaagagtgtccatccagtacctgtacatttagcatatataggtcccattttttgctttctgtatccaggtagacatagatattctatagtgtctcctatgttgtaattagcattagcatcagtctccacactattcttaaatttcatattaatgggtcgtgacggaatagtacagcatgatagaacgcatcctattcccaacaatgtcaggaacgtcacgctctccaccttcatatttatttatccgtaaaaatgttatcctggacatcgtacaaataataaaaagcccatatatgttcgctattgtagaaattgtttttcacagttgctcaaaaacgatggcagtgacttatgagttacgttacactttggagtctcatctttagtaaacatatcataatattcgatattacgagttgacatatcgaacaaattccaagtatttgattttggataatattcgtattttgcatctgctataattaagatataatcaccgcaagaacacacgaacatctttcctacatggttaaagtacatgtacaattctatccatttgtcttccttaactatatatttgtatagataattacgagtctcgtgagtaattccagtaattacatagatgtcgccgtcgtactctacagcataaactatactatgatgtctaggcatgggagacttttttatccaacgatttttagtgaaacattccacatcgtttaatactacatatttttcatacgtggtataaactccacccattacatatatatcatcgtttacgaataccgacgcgcctgaatatctaggagtaattaagtttggaagtcttatccatttcgaagtgccgtgtttcaaatattctgccacacccgttgaaatagaaaattctaatcctcctattacatataactttccatcgttaacacaagtactaacttctgattttaacgacgacatattagtaaccgttttccattttttcgtttcaagatctacccgcgatacggaataaacatgtctattgttaatcatgccgccaataatgtatagacaattatgtaaaacatttgcattatagaattgtctatctgtattaccgactatcgtccaatattctgttctaggagagtaatgggttattgtggatatataatcagagtttttaatgactactatattatgttttataccatttcgtgtcactggctttgtagatttggatatagttaatcccaacaatgatatagcattgcgcatagtattagtcataaacttgggatgtaaaatgttgatgatatctacatcgtttggatttttatgtatccactttaataatatcatagctgtaacatcctcatgatttacgttaacgtcttcgtgggataagatagttgtcagttcatcctttgataattttccaaattctggatcggatgtcttaaggaagttcctatactttctagagaataggaacttcttacttgtacagctcgtccatgccgagagtgatcccggcggcggtcacgaactccagcaggaccatgtgatcgcgcttctcgttggggtctttgctcagggcggactgggtgctcaggtagtggttgtcgggcagcagcacggggccgtcgccgatgggggtgttctgctggtagtggtcggcgagctgcacgctgccgtcctcgatgttgtggcggatcttgaagttcaccttgatgccgttcttctgcttgtcggccatgatatagacgttgtggctgttgtagttgtactccagcttgtgccccaggatgttgccgtcctccttgaagtcgatgcccttcagctcgatgcggttcaccagggtgtcgccctcgaacttcacctcggcgcgggtcttgtagttgccgtcgtccttgaagaagatggtgcgctcctggacgtagccttcgggcatggcggacttgaagaagtcgtgctgcttcatgtggtcggggtagcggctgaagcactgcacgccgtaggtcagggtggtcacgagggtgggccagggcacgggcagcttgccggtggtgcagatgaacttcagggtcagcttgccgtaggtggcatcgccctcgccctcgccggacacgctgaacttgtggccgtttacgtcgccgtccagctcgaccaggatgggcaccaccccggtgaacagctcctcgcccttgctcaccatttttagagagaactaacacaaccagcaataaaactgaacctactttatcatttttttattcatcatcctcgaagttcctatactttctagagaataggaacttcgcggccgcactgccgcggtcagccgttgttctttgggtggttcttccgcacaggtttcttggtaggagcgcacaggtcggttctagcggttccgcgcaggccggctctgtcgttagggccgccgtcaggctcgtcgccagagctgccgtcccgttccttatcgccgctggccacgtcgccctcgctgctctcgtcggtgggttcctcatcggttccgccggcagggcccaccagcacggtcagctcgatgttatcttcattagctgtaggccttctaggtctccggtaggggagcacggtcactcttgtgttgttggcggcgtacagggcccgcacggtgccgctgacccggcagatgccgccgaaggcgaacacgatgaagatttggtaaaagccgaagaagcacaggaagcccagcacggcgccggggctgaatgtgccagcaggggctgtcaggatgaccagcagggtccaggtacacagggccactcccaccagtccggcgaccaccacgctcatcagcaggaacagctcgaagatttcctgtctttccatttctggccacaggttcagtctgctccgccactgggttcttgttctatagatcactctgcacatctgacaggcggtgtttctggacacggtcagccatgtagacagacattgagggtgcaccacgtccagctcgccggtgcaggcgcaggggtgaataccctcatttcccacctcttcccggcagatccagcagatggggccctcaacgccctcttccacgtccttggaggccatcccgggtacgatacaaacttaacggatatcgcgataatgaaataatttatgattatttctcgctttcaatttaacacaaccctcaagaacctttgtatttattttcattttttaagtatagaataaagaatctataaaaactaaaaaaattatacatcataaaccaatttcctagttgtttgtaactttaagtcgacaaatctcgtaagataaagtttatacaagtgtagatgataaattctacagaggttaatatagaagcacgtaataaattgacgacgttatgactatctatatatacctttccagtatacgagtaaataactatagaagttaaactgtgaatgtcaaggtctagacaaacccttgtaactggatctttatttttcgtgtatttttgacgtaaatgtgtgcgaaagtaaggagataactttttcaatatcgtagaattgactattatattgccacctatagcatcaataattgttttgaatttcttagtcatagacaatgctaatatattcttacagtacacagtattgacaaatatcggcatttatgtttctttaaaagtcaacatctaaagaaaaatgattatcttcttgagacataactcccattttttggtattcacccacacgtttttcgaaaaaattagtttttccttccaatgatatattttccatgaaatcaaacggattggtaacattataaatttttttaaatcccaattcagaaatcaatctatccgcgacaaattctatatatgttttcatcatttcacaattcattcctataagtttaactggaagagccgcagtaagaaattcttgttcaatggatactgcatctgttataatagatctaacggtttcttcactcggtggatacaataaatgtttaaacatcaaacatgcgaagtcgcagtgcagaccctcgtctctactaattagttcgttggaaaacgtgagtccgggcattaggccacgctttttaagccaaaatatggaagcgaatgatccggaaaagaagattccttctactgcagcaaaggcaataagtctctctccataaccggcgctgtcatgtatccacttttgagcccaatcggccttcttttttacacaaggcattgtttctatggcattaaagagatagtttttttcattactatctttaacataagtatcgatcaaaagactatacatttccgaatgaatgttttcaatggccatctgaaatccgtagaaacatctagcctcggtaatctgtacttctgtacaaaatcgttccgccaaattttcattcactattccgtcactggctgcaaaaaacgccaatacatgttttataaaatatttttcgtctggtgttagtttattccaatcattgatatctttagatatatctacttcttccactgtccaaaatgatgcctctgcctttttatacatgttccagatgtcataatattggattgggaaaataacaaatctatttggatttggtgcaaggatgggttccataactaaattaacaatatcaataaattttttttcagttatctatatgcctgtacttggattttttgtacatcgatatcgccgcaatcactacaataattacaagtattattgatagcattgttattagtactatcataattaaattatcgacattcatgggtgctgaataatcgttattatcatcattatcattttgtaattgtgacatcatactagataaatcgtttgcgagattgttgtgggaagcgggcatggaggatgcattatcattattatttaacgccttccattcggattcacaaatatggcgcgcgttcaacattttatggaaactataattttgtgaaaacagataacaagaaaactcgtcatcgttcaaatttttaacgatagtaaaccgattaaacgtcgagctaatttctaacgctagcgactctgttggatatgggtttccagatatatatcttttcagttcccctacgtatctataatcatctgtaggaaatggaagatatttccatttatctactgttcctaatatcatatgtggtggtgtagtagaaccattaagcgcgaaagatgttatttcgcatcgtattttaacttcgcaataatttctggttagataacgcactctaccagtcaagtcaatgatattagcctttacagatatattcatagtagtcgtaacgatgactccatcttttagatgcgatactcctttgtatgtaccagaatcttcgtacctcaaactcgatatatttaaacaagttaatgagatattaacgcgttttatgaatgatgatatataaccagaagttttatcctcggtggctagcgctataaccttatcattataataccaactagtgtgattaatatgtgacacgtcagtgtgggtacaaatatgtacattatcgtctacgtcgtattcgatacatccgcatacagccaacaaatataaaatgacaaatactctaacgacgttcgtacccatcttgatgcggtttaataaatgttttgatttcaatttattgtaaaaaaagattcggttttatactgttcgatattctcattgcttatattttcatctatcatctccacacagtcaaatccgtggttagcatgcacctcatcaaccggtaaaagactatcggactcttctatcattataactctagaatatttaatttggtcattattaatcaagtcaattatcttatttttaacaaacgtgagtattttactcattttttataaaaacttttagaaatatacagactctatcgtgtgtctatatcttctttttatatccaatgtatttatgtctgatttttcttcatttatcatatataatggtccaaattctacacgtgcttcggattcatccagatcattaaggttcttataattgtaacatccttctcttccctcttctacatcttccttcttattcttattcttattcttattcttattcttattcttattcttattcttagcgtcacagaatctaccacagcagaatcccatgacgagcgtcatattaaactaattcattttcaattataatatacgattagtaatgaccattaaaataaaaaatattcttcataaccggcaagaaagtgaaaagttcacattgaaactatgtcagtagtatacatcatgaaatgatgatatatatatattctctattttggtggaggattatatgatataattcgtggataatcattcttaagacacatttcttcattcgtaaatcttttcacgttaaatgagtgtccatattttgcaatttcttcatatgatggcggtgtacgtggacgaggctgctcctgttcttgttgtggtcgccgactatcgtgtttgcgtttagatccctccattatcgcgattgcgtagatggagtactattttataccttgtaattaaatttttttattaattaaacgtataaaaacgttccgtatctgtatttaagagccagatttcgtctaatagaacaaatagctacagtaaaaataactagaataattgctacacccactagaaaccacggatcgtaatacggcaatcggttttcgataataggtggaacgtatattttatttaaggacttaacaattgtctgtaaaccacaatttgcttcagcggatcctgtattaactatctgtaaaagcatatgttgaccgggcggagccgaacattctccgatatctaatttctgtatatctataatattattaacctccgcatacgcattacagttcttttctagcttggataccgcactaggtacatcgtctagatctattcctatttcctcagcgatagctcttctatccttttccggaagcaatgaaatcacttcaataaatgattcaaccatgagtgtgaaactaagtctagaattactcatgcatttgttagttattcggagcgcgcaatttttaaactgtcctataacctctcctatatgaatagcacaagtgacattagtagggatagaatgttgagctaatttttgtaaataactatctataaaaagattatacaaagttttaaactctttagtttccgccatttatccagtctgagaaaatgtctctcataataaatttttccaagaaactaattgggtgaagaatggaaacctttaatctatatttatcacagtctgttttggtacacatgatgaattcttccaatgccgtactaaattcgatatctttttcgatttctggatatgtttttaataaagtatgaacaaagaaatggaaatcgtaataccagttatgtttaactttgaaattgttttttattttcttgttaatgattccagccacttgggaaaagtcaaagtcgtttaatgccgatttaatacgttcattaaaaacaaactttttatcctttagatgaattattattggttcattggaatcaaaaagtaagatattatcgggtttaagatctgcgtgtaaaaagttgtcgcagcatggtagttcgtagattttaatgtataacagagccatctgtaaaaagataaactttatgtattgtaccaaagatttaaatcctaatttgatagctaactcggtatctactttatctgccgaatacagtgctaggggaaaaattataatgtttcctctttcatattcgtagttagttctcttttcatgttcgaaaaagtgaaacatgcggttaaaatagtttataacattaatattactgttaataactgccgggtaaaagtgggatagtaatttcacgaatttgatactgtcctttctctcgttaaacgcctttagaaaaactttagaagaatatctcaatgagagttcctgaccatccatagtttgtatcaataatagcaacatatgaagaacacgtttatacagagtatgtaaaaatgttaatttatagtttaatcccatggcccacgcacacacgattaattttttttcatctccctttagattgttgtatagaaatttgggtactgtgaactccgccgtagtttccatgggactatataattttgtggcctcgaatacaaattttactacatagttatctatcttaaaaactataccatatcctcctgtagatatgtgataaaaatcgtcgtttataggataaaatcgtttatccttttgttggaaaaatgatgaattaatgtaatcattctcttctatctttagtagtgtttccctattaaaattcttaaaataatttaacaatctaactgacggagcccaattttggtgtaaatctaattgggacattatgttgttaaaatataaacagtctcctaatataacagtatctgataatctatggggagacatccattgatattcaggggatgaatcattggcaacacccatttattgtacaaaaagccccaatttacaaacgaaagtccaggtttgatagagacaaactattaactattttgtctctgtttttaacacctccacagtttttaatttctttggtaatgaaattattcacaatatcagtatcttctttatctaccagagattttactaacttgataaccttggctgtctcattcaatagggtagtaatatttgtatgtgtgatattgatatctttttgaattgtttcttttagaagtgattctttgatggtgtcagcatacgaattacaataatgcagaaactcggttaacatgcaggaattatagtaagccaattccaattgttgcctgtgttgtattagagtgtcaatatgagcaatggtgtccttgcgtttctctgatagaatgcgagcagcgattttggcgttatcatttgacgatatttctggaatgacgaatcctgtttctactaactttttggtaggacaaagtgaaacaatcaagaagatagcttctcctcctatttgtggaagaaattgaactcctctagatgatctactgacgatagtatctccttgacagatattggaccgaattacagaagtacctggaatgtaaagccctgaaaccccctcattttttaagcagattgttgccgtaaatcctgcactgtgaccaagatagagagctcctttggtgaatccatctctatgtttcagtttaaccaagaaacagtcagctggtctaaaatttccatctctatctaatacagcatctaacttgatgtcaggaactatgaccggtttaatgttatatgtaacattgagtaaatccttaagttcataatcatcactgtcatcagttatgtacgatccaaacaatgtttctaccggcatagtggatacgaagatgctatccatcagaatgtttccctgattagtattttctatatagctattcttctttaaacgattttccaaatcagtaactatgttcatttttttaggagtaggacgcctagccagtatggaagaggattttctagatcctctcttcaacatctttgatctcaatggaatgcaaaaccccatagtgaaacaaccaacgataaaaataatattgtttttcactttttataattttaccatctgactcatggattcattaatatctttataagagctactaacgtataattctttataactgaactgagatatatacaccggatctatggtttccataattgagtaaatgaatgctcggcaataactaatggcaaatgtatagaacaacgaaattatactagagttgttaaagttaatattttctatgagctgttccaataaattatttgttgtgactgcgttcaagtcataaatcatcttgatactatccagtaaaccgtttttaagttctggaatattattatcccattgtaaagcccctaattcgactatcgaatatcctgctctgatagcagtttcaatatcgacggacgtcaatactgtaataaaggtggtagtattgtcatcatcgtgataaactactggaatatggtcgttagtaggtacggtaactttacacaacgcgatatataactttccttttgtaccatttttaacgtagttgggacgtcctgcagggtattgttttgaagaaatgatatcgagaacagatttgatacgatatttgttggattcctgattatttactataatataatctagacagatagatgattcgataaatagagaaggtatatcgttggtaggataatacatccccattccagtattctcggatactctattaatgacactagttaagaacatgtcttctattctagaaaacgaaaacatcctacatggactcattaaaacttctaacgctcctgattgtgtctcgaatgcctcgtacaaggatttcaaggatgccatagattctttgaccaacgatttagaattgcgtttagcatctgatttttttattaaatcgaatggtcggctctctggtttgctaccccaatgataacaatagtcttgtaaagataaaccgcaagaaaatttatacgcatccatccaaataaccctagcaccatcggatgatattaatgtattattatagattttccatccacaattattgggccagtatactgttagcaacggtatatcgaatagattactcatgtaacctactagaatgatagttcgtgtactagtcataatatctttaatccaatctaagaaatttaaaattagattttttacactgttaaagttaacaaaggtattacccgggtacgtggatatcatatatggtattggtccattatcagtaatagctccataaactgatacggcgatggtttttatatgtgtttgatctaacgaggaagaaattcgcacccacaattcatctctagatatgtatttaatatcaaacggtaacacatcaatttcgggacgcgtatatgtttctaaatttttaatccaaatataatgatgacctatatgccctattatcatactgtcaactatagtacacctagagaacttacgatacatctgtttcctataatcgttaaattttacaaatctataacatgctaaaccttttgacgacaaccattcattaatttctgatatggaatctgtattctcgataccgtattgttctaaagccagtgctatatctccctgttcgtgggaacgctttcgtataatatcgatcaacggataatctgaagtttttggagaataatatgactcatgatctatttcgtccataaacaatctagacataggaattggaggcgatgatcttaattttgtgcaatgagtcgtcaatcctataacttctaatcttgtaatattcatcatcgacataatactatctatgttatcatcgtatattagtataccatgaccttcttcatttcgtgccaaaatgatatacagtcttaaatagttacgcaatatctcaatagtttcataattgttagctgttttcatcaagatttgtaccctgtttaacatgatggcgttctatacgtttctattttctattttttaaatttttaaatttttaacgatttactgtggctagatacccaatctctctcaaatatttttttagcctcgcttacaagctgtttatctatactattaaaactgacgaatccgtgattttggtaatgggttccgtcgaaatttgccgaagtgatatgaacatattcgtcgtcgactatcaacaattttgtattattctgaatagtgaaaaccttcacagatagatcattttgaacacacaacgcgtctagacttctggcggttgccatagaatatacgtcgttcttatcccaattaccaactagaagtctgatcttaactcctctattaatggctgcttctataatggagttgtaaatgtcgggccaatagtagctattaccgtcgacacgtgtagtgggaactatggccaaatgttcaatatctatactagtcttagctgacctgagtttatcaataactacatcggtatctagatctctagaatatcccaataggtgttccggagaatcagtaaagaacactccacctataggattcttaatatgatacgcagtgctaactggcagacaacaagccgcagagcataaattcaaccatgaattttttgcgctattaaaggctttaaaagtatcaaatcttctacgaagatctgtggccagcgggggataatcagaatatacacctaacgttttaatcgtatgtatagatcctccagtaaatgacgcgtttcctacataacatctttcatcatctgacacccaaaaacaaccgagtagtagtcccacattattttttttatctatattaacggttataaaatttatatccgggcagtgactttgtagctctcccagatttcttttccctcgttcatctagcaaaactattattttaatccctttttcagatgcctcttttagtttatcaaaaataagcgctcccctagtcgtactcagaggattacaacaaaaagatgctatgtatatatatttcttagctagagtgataatttcgttaaaacattcaaatgttgttaaatgatcggatctaaaatccatattttctggtagtgtttctaccagcctacattttgctcccgcaggtaccgatgcaaatggccacatttagttaacataaaaacttatacatcctgttctatcaacgattctagaatatcatcggctatatcgctaaaattttcatcaaagtcgacatcacaacctaactcagtcaatatattaagaagttccatgatgtcatcttcgtctatttctatatccgtatccattgtagattgttgaccgattatcgagtttaaatcattactaatactcaatccttcagaatacaatctgtatttcattgtaaatttataggcggtgtatttaagttggtagattttcaattatgtatcaatatagcaacagtagttcttgctcctccttgattctagcatcctcttcattattttcttctacgtacataaacatgtccaatacgttagacaacacaccgacgatggcggccgccacagacacgaatatgactagaccgatgaccatttaaaaacccctctctagctttcacttaaactgtatcgatcattcttttagcacatgtataatataaaaaaacattattctatttcgaatttaggcttccaaaaatttttcatccgtaaaccgataataatatatatagacttgttaatagtcggaataaatagattaatgcttaaactatcatcatctccacgattagagatacaatatttacattctttttgctgtttcgaaactttatcaatacacgttaatacaaacccaggaaggagatattgaaactgaggctgttgaaaatgaaacggtgaatacaataattcagataatgtaaaatcatgattccgtattctgatgatattagaactgctaatggatgtcgatggtatgtatctaggagtatctattttaacaaagcatcgatttgctaatatacaattatcattttgattaattgttattttattcatattcttaaaaggtttcatatttatcaattcttctacattaaaaatttccatttttaatttatgtagccccgcaatactcctcattacgtttcattttttgtctataatatccattttgttcatctcggtacatagattatccaattgagaagcgcatttagtagttttgtacattttaagtttattgacgaatcgtcgaaaactagttatagttaacattttattatttgataccctgatattaatacccctgccgttactattatttataactgatgtaacccacgtaacattggaattaactatcgatagtaatgcatcgacgcttccaaaattgtctattataaactcaccgataatttttttattacatgttttcatattcattaggattatcaaatctttaatcttactacgattgtatgcgttgatattacaagacgtcattctaaaagacggaggatttccatcaaatgccagacaatcacgtacaaagtacatggaaataggttttgttctattgcgcatcatagattcatatagaacacccgtagaaatactaatttgttttactctataaaatactaatgcatctatttcatcgttttgtataacgtctttccaagtgtcaaattccaaatttttttcattgatagtaccaaattcttctatctctttaactacttgcatagataggtaattacagtgatgcctacatgccgttttttgaaactgaatagatgcgtctagaagcgatgctacgctagtcacaatcaccactttcatatttagaatatatgtatgtaaaaatatagtagaatttcattttgtttttttctatgctataaatgaattctcattttgcatctgctcatactccgttttatatcaataccaaagaaggaagatatctggttctaaaagccgttaaagtatgcgatgttagaactgtagaatgcgaaggaagtaaagcttcctgcgtactcaaagtagataaaccctcatcacccgcgtgtgagagaagaccttcgtccccgtccagatgcgagagaatgaataaccctggaaaacaagtcccgtttatgaggacggacatgctacaaaatatgttcgcggctaatcgcgataatgtagcttctagacttttgaactaaaatacaattatatctttttcgatattaataaatccgtgtcgtccaggttttttatctctttcagtatgtgaatagataggtattttatctctattcatcatcgaatttaagagatccgataaacattgtttgtattctccagatgtcagcatctgatacaacaatatatgtgcacataaacctctggcacttatttcatgtaccttccccttatcactaaggagaatagtatttgagaaatatgtatacatgatattatcatgaattagatatacagaatttgtaacactctcgaaatcacacgatgtgtcggcgttaagatctaatatatcactcgataacacattttcatctagatacactagacattttttaaagctaaaatagtctttagtagtgacagtaactatgcgattattttcatcgatgatacatttcatcggcatattattacgcttaccatcaaagactataccatgtgtatatctaacgtattctagcatagttgccatacgtgcattaaacttttcaggatctttggatagatcttccaatctatctatttgagaaaacatttttatcatgttcaatagttgaaacgtcggatccactatatagatattatctataaagattttaggaactacgttcatggtatcctggcgaatattaaaactatcaatgatatgattatcgttttcatcttttatcaccatatagtttctaagatatgggattttacttaatataatattatttcccgtaataaattttattagaaatgccaaatctataagaaaagtcctcgaattagtttgaagaatatctatatcgccgtaccgtatatttggattaattagatatagagaatatgatccgtaacatatacaacttttattatggcgtctaagatattcttccatcaacttattaacatttttgactagggaagatacattatgacgtcccattacttttgccttgtctattattgcgacgttcatagaatttagcatatctcttgccaattcttccattgatgttacattataagaaattttagatgaaattacatttggagctttaatagtaagaactcctaatatgtccgtgtatgtggtcactaatacagattgtagttctataatcgtaaataatttacctatattatatgtttgagtctgtttagaaaagtagctaagtatacgatcttttatttctgatgcagatgtatcaacatcggaaaaaaatctttttttattcttttttactaaagatacaaatatgtctttgttaaaaacagttattttttgaatatttctagcttgtaattttaacatatgatattcattcacactaggtactctgcctaaataggtttctataatctttaatgtaatattaggaaaagtattctgatcaggattcctattcattttgaggatttaaaactctgattattgtctaatatggtctctacgcaaactttttcacagagcgatagagtttttgataactcgtttttcttaagaaatataaaactactgtctccagagctcgctctatcttttattttatttaattcgatacaaactcctgatactggttcagaaagtaattcattaattttcagtcctttatagaagatatttaatatagataatacaaaatcttcagtttttgatatcgatctgattgatcctagaactagatatattaataacgtgctcattaggcagtttatggcagcttgataattagatatagtatattccagttcatatttattagataccgcattgcccagattttgatattctatgaattcctctgaaaataaatccaaaataactaaacattctattttttgtggattagtgtactctcttccctctatcatgttcactactggtgtccacgatgataaatatctagagggaatataatatagtccataggatgccaatctagcaatgtcgaataactgtaatttgattcttcgttcttcattatgaattgattcttgaggtataaacctaacacaaattatattattagacttttcgtatgtaatgtctttcatgttataagtttttaatcctggaatagaatctattttaatgaggcttttaaacgcagagttctccaacgagtcaaagcataatactctgttgtttttcttatatacgatgttacgattttcttctttgaatggaataggtttttgaattagtttataattacaacataatagataaggaagtgtgcaaatagtacgcggaaaaaacataatagctcccctgttttcatccatggttttaagtaaatgatcactggcttctttagttaatggatattcgaacattaaccgtttcatcatcattggacagaatccatatttcttaatgtaaagagtgatcaaatcattgtgtttattgtaccatcttgttgtaaatgtgtattcggttatcggatctgctcctttttctattaaagtatcgatgtcgatctcgtctaagaattcaactatatcgacatatttcatttgtatacacataaccattactaacgtagaatgtataggaagagatgtaacgggaacagggtttgttgattcgcaaactattctaatacataattcttctgttaatacgtcttgcacgtaatctattatagatgccaagatatctatataattattttgtaagatgatgttaactatgtgatctatataagtagtgtaataattcatgtatttcgatatatgttccaactctgtctttgtgatgtctagtttcgtaatatctatagcatcctcaaaaaatatattcgcatatattcccaagtcttcagttctatcttctaaaaaatcttcaacgtatggaatataataatctattttacctcttctgatatcattaatgatatagtttttgacactatcttctgtcaattgattcttattcactatatctaagaaacggatagcgtccctaggacgaactactgccattaatatctctattatagcttctggacataattcatctattataccagaattaatgggaactattccgtatctatctaacatagttttaagaaagtcagaatctaagacctgatgttcatatattggttcatacatgaaatgatctctattgatgatagtgactatttcattctctgaaaattggtaactcattctatatatgctttccttgttgatgaaggatagaatatactcaatagaatttgtaccaacaaactgttctcttatgaatcgtatatcatcatctgaaataatcatgtaaggcatacatttaacaattagagacttgtctcctgttatcaatatactattcttgtgataatttatgtgtgaggcaaatttgtccacgttctttaattttgttatagtagatatcaaatccaatggagctacagttcttggcttaaacagatatagtttttctggaacaaattctacaacattattataaaggactttgggtagataagtgggatgaaatcctattttaattaatgctatcgcattgtcctcgtgcaaatatccaaacgcttttgtgatagtatggcattcattgtctagaaacgctctacgaatatctgtgacagatatcatctttagagaatatactagtcgcgttaatagtactacaatttgtattttttaatctatctcaataaaaaaattaatatgtatgattcaatgtataactaaactactaactgttattgataactagaatcagaatctaatgatgacgtaaccaagaagtttatctactgccaatttagctgcattatttttagcatctcgtttagattttccatctgccttatcgaatactcttccgtcgatgtctacacaggcataaaatgtaggagagttactaggcccaactgattcaatacgaaaagaccaatctctcttagttatttggcagtactcattaataatggtgacagggttagcatctttccaatcaataatttttttagccggaataacatcatcaaaagacttatgatcctctctcattgatttttcgcgggatacatcatctattatgacgtcagccatagcatcagcatccggcttatccgcctccgttgtcataaaccaacgaggaggaatatcgtcggagctgtacaccatagcactacgttgaagatcgtacagagctttattaacttctcgcttctccatattaagttgtctagttagttgtgcagcagtagctccttcgattccaatgtttttaatagccgcacacacaatctctgcgtcagaacgctcgtcaatatagatcttagacatttttagagagaactaacacaaccagcaataaaactgaacctactttatcatttttttattcatcatcctctggtggttcgtcgtttctatcgaatgtagctctgattaacccgtcatctataggtgatgctggttctggagattctggaggagatggattattatctggaagaatctctgttatttccttgttttcatgtatcgattgcgttgtaacattaagattgcgaaatgctctaaatttgggaggcttaaagtgttgtttgcaatctctacacgcgtgtctaactagtggaggttcgtcagctgctctagtttgaatcatcatcggcgtagtattcctacttttacagttaggacacggtgtattgtatttctcgtcgagaacgttaaaataatcgttgtaactcacatcctttattttatctatattgtattctactcctttcttaatgcattttataccgaataagagatagcgaaggaattctttttcggtgccgctagtacccttaatcatatcacatagtgttttatattccaaatttgtggcaatagacggtttatttctatacgatagtttgtttctggaatcctttgagtattctataccaatattattctttgattcgaatttagtttcttcgatattagattttgtattacctatattcttgatgtagtactttgatgatttttccatggcccattctattaagtcttccaagttggcatcatccacatattgtgatagtaattctcggatatcagtagcggctaccgccattgatgtttgttcattggatgagtaactactaatgtatacattttccatttataacacttatgtattaactttgttcatttatattttttcattattatgttgatattaacaaaagtgaatatatatgttaataattgtattgtggttatacggctacaatttcataatgagtggaagtcagtgtccgatgatcaatgacgatagctttactctgaaaagaaagtatcaaatcgatagtgcggagtcaacaatgaaaatggataagaagaggacaaagtttcagaatagagccaaaatggtaaaagaaataaatcagacaataagagcagcacaaactcattacgagacattgaaactaggatacataaaatttaagagaatgattaggactactactctagaagatatagcaccatctattccaaataatcagaaaacttataaactattctcggacatttcagccatcggcaaagcatcacagaatccgagtaagatggtatatgctctgctgctttacatgtttcccaatttgtttggagatgatcatagattcattcgttatagaatgcatccaatgagtaaaatcaaacacaagatcttctctcctttcaaacttaatcttattagaatattagtggaagaaagattctataataatgaatgcagatctaataaatggagaataattggaacacaagttgataaaatgttgatagctgaatctgataaatatacaatagatgcaaggtataacctaaaacccatgtatagaatcaagggaaaatctgaagaagataccctcttcatcaaacagatggtagaacaatgtgtgacatcccaggaattggtggaaaaagtgttgaagatactgtttagagatttgttcaagagtggagaatacaaagcgtacagatacgatgatgatgtagaaaatggatttattggattggatacactaaaattaaacattgttcatgatatagttgaaccatgtatgcctgttcgtaggccagtggctaagatactgtgtaaagaaatggtaaataaatactttgagaatccgctacatattattggtaaaaatcttcaagagtgcattgactttgttagtgaataggcatttcatctttctccaatactaattcaaattgttaaattaataatggatagtataaatagttattagtgataaaatagtaaaaataattattagaataagagtgtagtatcatagataactctcttctataaaaatggattttattcgtagaaagtatcttatatacacagtagaaaataatatagattttttaaaggatgatacattaagtaaagtaaacaattttaccctcaatcatgtactagctctcaagtatctagttagcaattttcctcaacacgttattactaaggatgtattagctaataccaatttttttgttttcatacatatggtacgatgttgtaaagtgtacgaagcggttttacgacacgcatttgatgcacccacgttgtacgttaaagcattgactaagaattatttatcgtttagtaacgcaatacaatcgtacaaggaaaccgtgcataaactaacacaagatgaaaaatttttagaggttgccgaatacatggacgaattaggagaacttataggcgtaaattatgacttagttcttaatccattatttcacggaggggaacccatcaaagatatggaaatcatttttttaaaactgtttaagaaaacagacttcaaagttgttaaaaaattaagtgttataagattacttatttgggcttacctaagcaagaaagatacaggcatagagtttgcggataatgatagacaagatatatacactctatttcaacaaactggtagaatcgtccatagcaatctaacagaaacgtttagagattatatctttcccggagataagactagctattgggtgtggttaaacgaaagtatagctaatgatgcggatattgttcttaatagacacgccattaccatgtatgataaaattcttagttatatatactctgagataaaacaaggacgcgttaataaaaacatgcttaagttagtttatatctttgagcctgaaaaagatatcagagaacttctgctagaaatcatatatgatattcctggagatatcctatctattattgatgcaaaaaacgacgattggaaaaaatattttattagtttttataaagctaattttattaacggtaatacatttattagtgatagaacgtttaacgaggacttattcagagttgttgttcaaatagatcccgaatatttcgataatgaacgaattatgtctttattctctacgagtgctgcggacattaaacgatttgatgagttagatattaataacagttatatatctaatataatttatgaggtgaacgatatcacattagatacaatggatgatatgaagaagtgtcaaatctttaacgaggatacgtcgtattatgttaaggaatacaatacatacctgtttttgcacgagtcggatcccatggtcatagagaacggaatactaaagaaactgtcatctataaaatccaagagtaaacggctgaacttgtttagcaaaaacattttaaaatattatttagacggacaattggctcgtctaggtcttgtgttagatgattataaaggagacttgttagttaaaatgataaaccatcttaagtctgtggaggatgtatccgcattcgttcgattttctacagataaaaaccctagtattcttccatcgctaatcaaaactattttagctagttataatatttccatcatcgtcttatttcaaaggtttttgagagataatctatatcatgtagaagaattcttggataaaagcatccatctaaccaagacggataagaaatatatacttcaattgataagacacggtagatcatagaacagaccaaatatattattaataatttggtatatacatagatattaattatcacatattaaaaattcacacatttttgataaatgggaactgctgcaacaattcagactcccaccaaattaatgaataaagaaaatgcagaaatgattttggaaaaaattgttgatcatatagttatgtatattagtgacgaatcaagtgattcagaaaataatcctgaatatattgattttcgtaacagatacgaagactatagatctctcattataaaaagtgatcacgagtttgtaaagctatgtaaaaatcatgcagagaaaagttctccagaaacgcaacaaatgattatcaaacacatatacgaacaatatcttattccagtatctgaagtactattaaaacctataatgtccatgggtgacataattacatataacggatgtaaagacaatgaatggatgctagaacaactctctaccctaaactttaacaatctccgcacatggaactcatgtagcataggcaatgtaacgcgtctgttttatacattttttagttatctgatgaaagataaactaaatatataagtataatcccattctaatactttaacctgatgtattagcatcttattagaatattaacctaactaaaagacataacataaaaactcattacatagttgataaaaagcggtaggatataaatattatggctgccaccgttccgcgttttgacgacgtgtacaaaaatgcacaaagaagaattctagatcaagaaacattttttagtagaggtctaagtagaccgttaatgaaaaacacatatctatttgataattacgcgtatggatggataccagaaactgcaatttggagtagtagatacgcaaacttagatgcaagtgactattatcccatttcgttgggattacttaaaaagttcgagtttctcatgtctctatataaaggtcctattccagtatacgaagaaaaagtaaatactgaattcatagccaatggatcgttctctggtagatacgtatcatatcttcgaaagttttctgctcttccaacaaacgagtttattagttttttattattgacctccatccctatctataatatcttattctggtttaaaaacacacagtttgatattactaaacacacattattcagatacgtctatacagataatgccaaacacctggcgttggctaggtatatgcatcaaacaggagactataagcctttgtttagtcgtctcaaagagaattatatatttaccggtcccgttccaatatgtatcaaagatatagatcaccctaatcttagtagagcaagaagtccatccgattatgagacattagctaatattagtactatattgtactttaccaagtatgatccggtattaatgtttttattgttttacgtacctgggtattcaattactacaaaaattactccagccgtagaatatctaatggataaactgaatctaacaaagagcgacgtacaactgttgtaaattattttatgcttcgtaaaatgtaggttttgaaccaaacattctttcaaagaatgagatgcataaaactttattatccaatagattgactatttcggacgtcaatcgtttaaagtaaacttcgtaaaatattctttgatcactgccgagtttaaaacttctatcgataattgtctcatatgttttaatatttacaagttttttggtccatggtacattagccggacaaatatatgcaaaataatatcgttctccaagttctatagtttctggattatttttattatattcagtaaccaaatacatattagggttatctgcggatttataatttgagtgatgcattcgactcaacataaataattctagaggagacgatctactatcaaattcggatcgtaaatctgtttctaaagaacggagaatatctatacatacctgattagaattcatccgtccttcagacaacatctcagacagtctggtcttgtatgtcttaatcatattcttatgaaacttggaaacatctcttctagtttcactagtacctttattaattctctcaggtacagattttgaattcgacgatgctgagtatttcatcgttgtatatttcttcttcgattgcataatcagattcttatataccgcctcaaactctattttaaaattattaaacaatactctattattaatcagtcgttctaactctttcgctatttctatagacttatcgacatcttgactgtctatctctgtaaacacggagtcggtatctccatacacgctacgaaaacgaaatctgtaatctataggcaacgatgttttcacaatcggattaatatctctatcgtccatataaaatggattacttaatggattggcaaaccgtaacataccgttagataactctgctccatttagtaccgattctagatacaagatcattctacgtcctatggatgtgcaactcttagccgaagcgtatgagtatagagcactatttctaaatcccatcagaccatatactgagttggctactatcttgtacgtatattgcatggaatcatagatggccttttcagttgaactggtagcctgttttaacatctttttatatctggctctctctgccaaaaatgttcttaatagtctaggaatggttccttctatcgatctatcgaaaattgctatttcagagatgaggttcggtagtctaggttcacaatgaaccgtaatatatctaggaggtggatatttctgaagcaatagctgattatttatttcttcttccaatctattggtactaacaacgacaccgactaatgtttccggagatagatttccaaagatacacacattaggatacagactgttataatcaaagattaatacattattactaaacattttttgttttggagcaaataccttaccgccttcataaggaaacttttgttttgtttctgatctaactaagatagttttagtttccaacaatagctttaacagtggacccttgatgactgtactcgctctatattcgaataccatggattgaggaagcacatatgttgacgcacccgcgtctgtttttgtttctactccataatactcccacaaatactgacacaaacaagcatcatgaatacagtatctagccatatctaaagctatgtttagattataatccttatacatctgagctaaatcaacgtcatcctttccgaaagataatttatatgtatcattaggtaaagtaggacataatagtacgactttaaatccattttcccaaatatctttacgaattactttacatataatatcctcatcaacagtcacataattacctgtggttaaaacctttgcaaatgcagcggctttgcctttcgcgtctgtagtatcgtcaccgataaacgtcatttctctaactcctctatttaatactttacccatgcaactgaacgcgttcttggatatagaatccaatttgtacgaatccaatttttcagatttttgaatgaatgaatatagatcgaaaaatatagttccattattgttattaacgtgaaacgtagtattggccatgccgcctactcccttatgactagactgatttctctcataaatacagagatgtacagcttcctttttgtccggagatctaaagataatcttctctcctgttaataactctagacgattagtaatatatctcagatcaaagttatgtccgttaaaggtaacgacgtagtcgaacgttagttccaacaattgtttagctattcgtaacaaaactatttcagaacatagaactagttctcgttcgtaatccatttccattagtgactgtatcctcaaacatcctctatcgacggcttcttgtatttcctgttccgttaacatctcttcattaatgagcgtaaacaataatcgtttaccacttaaatcgatataacagtaacttgtatgcgagattgggttaataaatacagaaggaaacttcttatcgaagtgacactctatatctagaaataagtacgatcttgggatatcgaatctaggtatttttttagcgaaacagttacgtggatcgtcacaatgataacatccattgttaatctttgtcaaatattgctcgtccaacgagtaacatccgtctggagatatcccgttagaaatataaaaccaactaatattgagaaattcatccatggtggcattttgtatgctgcgtttctttggctcttctatcaaccacatatctgcgacggagcattttctatctttaatatctagattataacttattgtctcgtcaatgtctatagttctcatctttcccaacggcctcgcattaaatggaggaggagacaatgactgatatatttcgtccgtcactacgtaataaaagtaatgaggaaatcgtataaatacggtctcaccatttcgacatctggatttcagatataaaaatctgttttcaccgtgactttcaaaccaattaatgcaccgaacatccatttatagaatttagaaatatattttcatttaaatgaatcccaaacattggggaagagccgtatggaccattatttttatagtactttcgcaagcgggtttagacggcaacatagaagcgtgtaaacgaaaactatatactatagttagcactcttccatgtcctgcatgtagacggcacgcgactattgctatagaggacaataatgtcatgtctagcgatgatctgaattatatttattattttttcatcagattatttaacaatttggcatctgatcccaaatacgcaatcgatgtgtcaaaggttaaacctttataaacttaacccattataaaacttatgattagtcacgactgaaataaccgcgtgattattttttggtataattctacacggcatggtttctgtgactatgaattcaacccccgttacattagtgaaatctttaacaaacagcaagggttcgtcaaagacataaaactcattgtttacaatcgaaatagaccccctatcacacttaaaataaaaaatatccttatcctttaccaccaaataaaattctgattggtcaatgtgaatgtattcacttaacagttccacaaatttatttattaactccgaggcacatacatcgtcggtattttttatggcaaactttactcttccagcatccgtttctaaaaaaatattaacgagttccatttatatcatccaatattattgaaatgacgttgatggacagatgatacaaataagaaggtacggtacctttgtccaccatctcctccaattcatgctctattttgtcattaactttaatgtatgaaaacagtacgccacatgcttccatgacagtgtgtaacactttggatacaaaatgtttgacattagtataattgtttaagactgtcaatctataatagatagtagctataatatattctatgatggtattgaagaagatgacaatcttggcatattgatcatttaacacagacatggtatcaacagatagcttgaatgaaagagaatcagtaattggaataagcgtcttctcgatggagtgtccgtataccaacatgtctgatattttgatgtattccattaaattatttagttttttctttttattctcgttaaacagcatttctgtcaacggaccccaacatcgttgaccgattaagttttgattgatttttccgtgtaaggcgtatctagtcagatcgtatagcctatccaataatccatcatctgtgcgtagatcacatcgtacactttttaattctctatagaagagcgacagacatctggaacaattacagacagcaatttctttattctctacagatgtaagatacttgaagacattcctatgatgatgcagaattttggataacacggtattgatggtatctgttaccataattcctttgatggctgatagtgtcagagcacaagatttccaatctttgacaatttttagcaccattatctttgttttgatatctatatcagacagcatggtgcgtctgacaacacagggattaagacggaaagatgaaatgattctctcaacatcttcaatggataccttgctattttttctggcattatctatatgtgcgagaatatcctctagagaatcagtatcctttttgatgatagtggatctcaatgacatgggacgtctaaaccttcttattctatcaccagattgcatggtgatttgtcttctttcttttatcataatgtaatctctaaattcatcggcaaattgtctatatctaaaatcataatatgagatgtttacctctacaaatatctgttcgtccaatgttagagtatctacatcagttttgtattccaaattaaacatggcaacggatttaattttatattcctctattaagtcctcgtcgataataacagaatgtagataatcatttaatccatcgtacatggttggaagatgcttgttgacaaaatctttaattgtcttgatgaaggtgggactatatctaacatcttgattaataaaatttataacattgtccataggatactttgtaactagttttatacacatctcttcatcggtaagtttagacagaatatcgtgaacaggtggtatattatattcatcagatatacgaagaacaatgtccaaatctatattgtttaatatattatatagatgtagtgtagctcctacaggaatatctttaactaagtcaatgatttcatcaaccgttagatctattttaaagttaatcatataggcattgatttttaaaaggtatgtagccttgactacattctcattaattaaccattccaagtcactgtgtgtaagaagattatattctatcataagcttgactacatttggtcccgataccattaaagaattcttatgatataaggaaacagcttttaggtactcatctactctacaagaattttggagagccttaacgatatcagtgacgtttattatttcaggaggaaaaaacctaacattgagaatgtcggagttaatagcttccagatacagtgattttggcaatagtccgtgtaatccataatccagtaacacgagctggtgcttgctagacaccttttcaatgtttaatttttttgaaataagctttgataaagccttcctcgcaaattccggatacatgaacatgtcggcgacatgattaagtattgttttttcattatttttatattttctcaacaagttctcaataccccaatagatgatagaatatcacccaatgcgtccatgttgtctatttccaacaggtcgctatatccaccaatagaagttttcccaaaaaagattctaggaacagttctaccaccagtaatttgttcaaaataatcccgcaattcattttcgggtttaaattctttaatatcgacaatttcatacgctcctcttttgaaactaaacttatttagaatatccagtgcatttctacaaaaaggacatgtatacttgacaaaaattgtcactttgttattggccaacctttgttgtacaaattcctcggccattttaatatttaagtgatataaaactatctcgacttatttaactctttagtcgagatatatggacgcagatagctatatgatagccaactacagaaggcaaacgctataaaaaacataattacgacgagcatatttataaatatttttattcagcattacttgatatagtaatattaggcacagtcaaacattcaaccactctcgatacattaactctctcattttctttaacaaattctgcaatatcttcgtaaaaagattcttgaaactttttagaatatctatcgactctagatgaaatagcgttcgtcaacatactatgttttgtatacataaaggcgcccattttaacagtttctagtgacaaaatgctagcgatcctaggatcctttagaatcacatagattgacgattcgtctctcttagtaactctagtaaaataatcatacaatctagtacgcgaaataatattatccttgacttgaggagatctaaacaatctagttttgagaacatcgataagttcatcgggaatgacatacatactatctttaatagaactcttttcatccagttgaatggattcgtccttaaccaactgattaatgagatcttctattttatcattttccagatgatatgtatgtccattaaagttaaattgtgtagcgcttctttttagtctagcagccaatactttaacatcactaatatcgatatacaaaggagatgatttatctatggtattaagaattcgtttttcgacatccgtcaaaaccaattcctttttgcctgtatcatccagttttccatcctttgtaaagaaattattttctactagactattaataagactgataaggattcctccataattgcacaatccaaactttttcacaaaactagactttacgagatctacaggaatgcgtacttcaggtttcttagcttgtgattttttcttttgcggacattttcttgtgaccaactcatctaccatttcattgattttagcagtgaaataagctttcaatgcacgggcactgatactattgaaaacgagttgatcttcaaattccgccatttaagttcaccaaacaacttttaaatacaaatatatcaatagtagtagaataagaactataaaaaaaataataattaaccaataccaaccccaacaaccggtattattagttgatgtgactgttttctcatcacttagaacagatttaacaatttctataaagtctgtcaaatcatcttccggagaccccataaatacaccaaatatagcggcgtacaacttatccatttatacattgaatattggcttttctttatcgctatcttcatcatattcatcatcaatatcaacaagtcccagattacgagccagatcttcttctacattttcagtcattgatacacgttcactatctccagagagtccgataacgttagccaccacttctctatcaatgattagtttcttgagtgcgaatgtaatttttgtttccgttccggatctatagaagacgataggtgtgataattgccttggccaattgtctttctcttttactgagtgattctagttcaccttctatagatctgagaatggatgattctccagccgaaacatattctaccatggctccgtttaatttgttgatgaagatggattcatccttaaatgttttctctgtaatagtttccaccgaaagactatgcaaagaatttggaatgcgttccttgtgcttaatgtttccatagacggcttctagaagttgatacaacataggactagccgcggtaacttttatttttagaaagtatccatcgcttctatcttgtttagatttatttttataaagtttagtctctccttccaacataataaaagtggaagtcatttgactagataaactatcagtaagttttatagagatagacgaacaattagcgtattgagaagcatttagtgtaacgtattcgatacattttgcattagatttactaatcgattttgcatactctataacacccgcacaagtctgtagagaatcgctagatgcagtaggtcttggtgaagtttcaactctcttcttgattaccttactcatgattaaacctaaataattgtactttgtaatataatgatatatattttcactttatctcatttgagaataaaaatgtttttgtttaaccactgcatgatgtacagatttcggaatcgcaaaccaccagtggttttattttatccttgtccaatgtgaattgaatgggagcggatgcgggtttcgtacgtagatagtacattcccgtttttagaccgagactccatccgtaaaaatgcatactcgttagtttggaataactcggatctgctatatggatattcatagattgactttgatcgatgaaggctcccctgtctgcagccatttttatgatcgtcttttgtggaatttcccaaatagttttataaactcgcttaatatcttctggaaggtttgtattctgaatggatccaccatctgccataatcctattcttgatctcatcattccataattttctctcggttaaaactctaaggagatgcggattaactacttgaaattctccagacaatactctccgagtgtaaatattactggtatacggttccaccgactcattatttcccaaaatttgagcagttgatgcagtcggcataggtgccaccaataaactatttctaagaccgtatgttctgattttatcttttagaggttcccaattccaaagatccgacggtacaacattccaaagatcatattgtagaataccgttactggcgtacgatcctacatatgtatcgtatggtccttccttctcagctagttcacaactcgcctctaatgcaccgtaataaatggtttcgaagatcttcttatttagatcttgtgcttccaggctatcaaatggataatttaagagaataaacgcgtccgctaatccttgaacaccaataccgataggtctatgtctcttattagagatttcagcttctggaataggataataattaatatctataattttattgagatttctgacaattactttgaccacatccttcagtttgagaaaatcaaatcgcccatctattacaaacatgttcaaggcaacagatgccagattacaaacggctacctcattagcatccgcatattgtattatctcagtgcaaagattactacacttgatagttcctaaattttgttgattactctttttgttacacgcatccttataaagaatgaatggagtaccagtttcaatctgagattctataatcgctttccagacgactcgagcctttattatagatttgtatctcctttctctttcgtatagtgtatacaatcgttcgaactcgtctccccaaacattgtccaatccaggacattcatccggacacatcaacgaccactctccgtcatccttcactcgtttcataaagagatcaggaatccaaagagctataaatagatctctggttctatgttcctcgtttcctgtattctttttaagatcgaggaacgccataatatcagaatgccacggttccaagtatatggccataactccaggccgtttgtttcctccctgatctatgtatctagcggtgttattataaactctcaacattggaataataccgtttgatataccattggtaccggagatatagcttccactggcacgaatattactaattgatagacctattccccctgccattttagagattaatgcgcatcgttttaacgtgtcatagataccctctatgctatcatcgatcatgttaagtaaaaaacagctagacatttggtgacgactagttcccgcattaaataaggtaggagaagcgtgcgtaaaccatttttcagaaagtagattgtacgtctcaatagctgagtctatatcccattgatgaattcctactgcgacacgcattaacatgtgctgaggtctttcaacgatcttgttgtttattttcaacaagtaggatttttccaaagttttaaaaccaaaatagttgtatgaaaagtctcgttcgtaaataataaccgagttgagtttatccttatatttgttaactatatccatggtgatacttgaaataatcggagaatgtttcccatttttaggattaacatagttgaataaatcctccatcacttcactaaatagtttttttgtttccttgtgtagatttgatacggctattctggcggctagaatggcataatccggatgttgtgtagtacaagtggctgctatttcggctgccagagtgtccaattctaccgttgttactccattatatattccttgaataaccttcatagctattttaataggatctatatgatccgtgtttaagccataacataattttctaatacgagacgtgattttatcaaacatgacattttccttgtatccatttcgtttaatgacaaacatttttgttggtgtaataaaaaaattatttaacttttcattaatagggatttgacgtatgtagcgtacaaaattatcgttcctggtatatagataaagagtcctatatatttgaaaatcgttacggctcgattaaactttaatgattgcatagtgaatatatcattaggatttaactccttgactatcatggcggcgccagaaattaccatcaaaagcattaatacagttatgccgatcgcagttagaacggttatagcatccaccatttatatctaaaaattagatcaaagaatatgtgacaaagtcctagttgtatactgagaattgacgaaacaatgtttcttacatatttttttcttattagtaactgacttaatagtaggaactggaaagctagacttgattattctataagtatagatacccttccagataatgttctctttgataaaagttccagaaaatgtagaattttttaaaaagttatcttttgctattaccaagattgtgtttagacgcttattattaatatgagtaatgaaatccacaccgcctctagatatcgcctttatttccacattagatggtaaatccaatagtgaaactatctttttaggaatgtatggactcgcgtttagaggagtgaacgtcttgggcgtcggaaaggatgattcgtcaaacgaataaacaatttcacaaatggatgttaatgtattagtaggaaatttcttgacgctagtggagttgaagattctaatggatgatgttctacctatttcatccgataacatgttaatttccgacaccaacggttttaatatttcgatgatatacggtagtctctctttcggacttatatagcttattccacaatacgagtcattatatactccaaaaaacaaaataactagtataaaatctgtatcgaatgggaaaaacgaaattatcgacataggtatagaatccggaacattgaacgtattaatacttaattctttttctgtggtaagtaccgataggttattgacattgtatggttttaaatattctataacttgagacttgatagatattagtgatgaattgaaaattatttttatcaccacgtgtgtttcaggatcatcgtcgacgcccgtcaaccaaccgaatggagtaaaataaatatcattaatatatgctctagatattagtatttttatcaatcctttgattatcatcttctcgtaggcgaatgattccatgatcaagagtgatttaagaacatcctccggagtattaatgggcttagtaaacagtccatcgttgcaataataaaagttatccaagttaaaggatattatgcattcgtttaaagatatcacctcatctgacggagacaattttttggtaggttttagagactttgaagctacttgtttaacaaagttattcatcgtcgtctactattctatttaattttgtagttaatttatcacatatcacattaattgactttttggtccatttttccatacgtttatattcttttaatcctgcgttatccgtttccgttatatccagtgatagatcgtgcaggttaaatagaatgctcttaaataatgtcatttttttatccgctaaaaatttaaagaatgtataaacctttttcagagatttgaaactcttaggtggtgtcctagtacacaatatcataaacaaactaataaacattccacattcagattccaacagctgattaacttccacattaatacagcctattttcgctccaaatgtacattcgaaaaatctgaataaaacatcgatgtcacaatttgtattatccaatacagaatgtctgtgattcgtgttaaaaccatcggagaaggaatagaaataaaaattattatagtggtggaattcagttggaatattgcctccggagtcataaaaggatactaaacattgttttttatcataaattacacatttccaatgagacaaataacaaaatccaaacattacaaatctagaggtagaacttttaattttgtctttaagtatatacgataagatatgtttattcataaacgcgtcaaatttttcatgaatcgctaaggagtttaagaatctcatgtcaaattgtcctatataatccacttcggatccataagcaaactgagagactaagttcttaatacttcgattgctcatccaggctcctctctcaggctctattttcatcttgacgacctttggattttcaccagtatgtattcctttacgtgataaatcatcgattttcaaatccatttgtgagaagtctatcgccttagatactttttcccgtagtcgaggtttaaaaaaatacgctaacggtatactagtaggtaactcaaagacatcatatatagaatggtaacgcgtctttaactcgtcggttaactctttcttttgatcgagttcgtcgctactattgggtctgctcaggtgccccgactctactagttccaacatcataccgataggaatacaagacactttgccggcggttgtagatttatcatatttctccactacatatccgttacaatttgttaaaaatttagatacatctatattgctacataatccagctagtgaatatatatgacataataaattggtaaatcctagttctggtattttactaattactaaatctgtatatctttccatttatcatggaaaagaatttaccagatatcttcttttttccaaactgcgttaatgtattctcttacaaatattcacaagatgaattcagtaatatgagtaaaacggaacgtgatagtttctcattggccgtgtttccagttataaaacatagatggcataacgcacacgttgtaaaacataaaggaatatacaaagttagtacagaagcacgtggaaaaaaagtatctcctccatcactaggaaaacccgcacacataaacctaaccacgaaacaatatatatacagtgaacacacaataagctttgaatgttatagttttctaaaatgtataacaaatacagaaatcaattcgttcgatgagtatatattaagaggactattagaagctggtaatagtttacagatattttccaattccgtaggtaaacgaacagatactataggtgtactagggaataagtatccatttagcaaaattccattggcctcattaactcctaaagcacaacgagagatattttcagcgtggatttctcatagacctgtagttttaactggaggaactggagtgggtaagacgtcacaggtacccaagttattgctttggtttaattatttatttggtggattctctactctagataaaatcactgactttcacgaaagaccagtcattctatctcttcctaggatagctttagttagattgcatagcaataccattttaaaatcattgggatttaaggtactagatggatctcctatttctttacggtacggatctataccggaagaattaataaacaaacaaccaaaaaaatatggaattgtattttctacccataagttatctctaacaaaactatttagttatggcactcttattatagacgaagttcatgagcatgatcaaataggagatattattatagcagtagcgagaaagcatcatacgaaaatagattctatgtttttaatgactgccacgttagaggatgacagggaacggctaaaagtatttttacctaatcccgcatttatacatattcctggagatacactgtttaaaattagcgaggtatttattcataataagataaatccatcttccagaatggcatacatagaagaagaaaagagaaatttagttactgctatacagatgtatactcctcctgatggatcatccggtatagtctttgtggcatccgttgcacagtgtcacgaatataaatcatatttagaaaaaagattaccgtatgatatgtatattattcatggtaaggtcttagatatagacgaaatattagaaaaagtgtattcatcacctaatgtatcgataattatttctactccttatttggaatccagcgttactatacgcaatgttacacacatttatgatatgggtagagtttttgtccccgctccttttggaggatcgcaagaatttatttctaaatctatgagagatcaacgaaaaggaagagtaggaagagttaatcctgggacatacgtatatttctatgatctgtcttatatgaagtctatacagcgaatagattcagaatttctacataattatatattgtacgctaataagtttaatctaacactccccgaagatttgtttataatccctacaaatttggatattctatggcgtacaaaggaatatatagactcgttcgatattagtacagaaacatggaataaattattatccaattattatatgaagatgatagagtatgctaaactttatgtactaagtcctattctcgctgaggagttggataactttgagaggacgggagaattaactagtattgtacgagaagccattttatctctaaatttacgaattaagattttaaattttaaacataaagatgatgatacgtatatacacttttgtaaaatattattcggtgtctataacggaacaaacgctactatatattatcatagacctctaacgggatatatgaatatgatttcagatactatatttgttcctgtagataataactaaaaatcaaactctaatgaccacatctttttttagagatgaaaaattttccacatctccttttgtagacacgactaaacattttgcagaaaaaagtttattagtgtttagataatcgtatacttcatcagtgtagatagtaaatgtgaacagataaaaggtattcttgctcaatagattggtaaattccatagaatatattaatcctttcttcttgagatcccacatcatttcaaccagagacgttttatccaatgatttacctcgtactataccacatacaaaactagattttgcagtgacgtcgtacctggtattcctaccaaacaaaattttacttttagttcttttagaaaattctaaggtagaatctctatttgccaatatgtcatctatggaattaccactagcaaaaaatgatagaaatatatattgatacatcgcagctggttttgatctactatactttaaaaacgaatcagattccataattgcctgtatatcatcagctgaaaaactatgttttacacgtattccttcggcatttctttttaatgatatatcttgtttagacaatgataaagttatcatgtccatgagagacgcgtctccgtatcgtataaatatttcattagatgttagacgcttcattaggggtatacttctataaggtttcttaatcagtccatcattggttgcgtcaagaactactatcggatgttgttgggtatctctagtgttacacatggccttactaaagtttgggtaaataactatgatatctctattaattatagatgcatatatttcattcgtcaaggatattagtatcgacttgctatcgtcattaatacgtgtaatgtaatcatataaatcatgcgatagccaaggaaaattcaaatagatgttcatcatataatcgtcgctataattcatattaatactttgacattgactaatttgtaatatagcctcgccacgaagaaagctctcgtattcagtttcatcgataaaggataccgttaaatataactggttgccgatagtctcatagtctattaagtggtaagtttcgtacaaatacagaatccctaaaatattatctaatgttggattaatctttaccataactgtataaaatggagacggagtcataactattttaccgtttgtacttactggaatagatgaaggaataatctccggacatgctggtaaagacccaaatgtctgtttgaagaaatccaatgttccaggtcctaatctcttaacaaaaattacgatattcgatcccgatatcctttgcattctatttaccagcatatcacgaactatattaagattatctatcatgtctattctcccaccgttatataaatcgcctccgctaagaaacgttagtatatccatacaatggaatacttcatttctaaaatagtattcgttttctaattctttaatgtgaaatcgtatactagaaagggaaaaattatctttgagttttccgttagaaaagaaccacgaaactaatgttctgattgcgtccgattccgttgctgaattaatggatttacaccaaaaactcatataacttctagatgtagaagcattcgctaaaaaattagtagaatcaaaggatataagtagatgttccaacaagtgagcaattcccaagatttcatctatatcattctcgaatccgaaattagaaattcccaagtagatatcctttttcatccgatcattgatgaaaatacgaactttattcggtaagacaatcatttactaaggagtaaaataggaagtaatgttcgtatgtcgttatcatcgtataaattaaaggtgtgttttttaccattaagtgacattataattttaccaatattggaattataatataggtgtatttgcgcactcgcgacggttgatgcatcggtaaatatagctgtatctaatgttctagtcggtatttcatcatttcgctgtctaataatagcgttttctctatctgtttccattacagctgcctgaagtttattggtcggataatatgtaaaataataagaaatacatacgaataacaaaaataaaataagatataataaagatgccatttagagatctaattttgttcaacttgtccaaattcctacttacagaagatgaggaatcgttggagatagtgtcttccttatgtagaggatttgaaatatcttatgatgacttgataacttactttccagataggaaataccataaatatatttctaaagtatttgaacatgtagatttatcggaggaattaagtatggaattccatgatacaactttgcgagatttagtttatcttagattgtacaagtattccaagtgtatacggccgtgttataaattaggagataatctaaaaggcatagttgttataaaggacaggaatatttatattagggaagcaaatgatgacttgatagaatatctcctcaaggaatacactcctcagatttatacatattctaatgagcgcgtccccataactggttcaaaattaattctttgtggattttctcaagttacatttatggcgtatacaacgtcgcatataacaacaaataaaaaggtagatgttctcgtttccaaaaaatgtatagatgaactagtcgatccaataaattatcaaatacttcaaaatttatttgataaaggaagcggaacaataaacaaaatactcaggaagatattttattcggtaacaggtggccaaactccataggtagctttttctatttcggattttagaatttccaaattcaccagcgatttatcggttttggtgaaatccaaggatttattaatgtccacaaatgccatttgttttgtctgtggattgtatttgaaaatggaaacgatgtagttagatagatgcgctgcgaagtttcctattagggttccgcgcttcacgtcacccagcatacttgaatcaccatcctttaaaaaaaatgataagatatcaacatggagtatatcatactcggattttaattcttctactgcatcactgacattttcacaaatactacaatacggtttaccgaaaataatcagtacgttcttcatttatgggtatcaaaaacttaaaatcgttactgctggaaaataaatcactgacgatattagatgataatttatacaaagtatacaatggaatatttgtggatacaatgagtatttatatagccgtcgccaattgtgtcagaaacttagaagagttaactacggtattcataaaatacgtaaacggatgggtaaaaaagggagggcatgtaaccctttttatcgatagaggaagtataaaaattaaacaagacgttagagacaagagacgtaaatattctaaattaaccaaggacagaaaaatgctagaattagaaaagtgtacatccgaaatacaaaatgttaccggatttatggaagaagaaataaaggcagaaatgcaattaaaaatcgataaactcacatttcaaatatatttatctgattctgataacataaaaatatcattgaatgagatactaacacatttcaacaataatgagaatgttacattattttattgtgatgaacgagacgcagaattcgttatgtgtctcgaggctaaaacacatttctctaccacaggagaatggccgttgataataagtaccgatcaggatactatgctatttgcatctactgataatcatcctaagatgataaaaaacttaactcaactgtttaaatttgttccctcggcagaggataactatttagcaaaattaacggcgttagtgaatggatgtgatttctttcctggactctatggggcatctataacacccaacaacttaaacaaaatacaattgtttagtgattttacaatcgataatatagtcactagtttggcaattaaaaattattatagaaagactaactctaccgtagacgtgcgtaatattgttacgtttataaacgattacgctaatttagacgatgtctactcgtatgttcctccttgtcaatgcactgttcaagaatttatattttccgcattagatgaaaaatggaacaattttaaatcatcttatttagagaccgttccgttaccctgtcaattaatgtacgcgttagaaccacgcaaggagattgatgtttcagaagttaaaactttatcatcttatatagatttcgaaaatactaaatcagatatcgatgttataaaatctatatcctcgatcttcggatattctaacgaaaactgtaacacgatagtattcggcatctataaggataatttactactgagtataaataattcattttactttaacgatagtctgttaataaccaatactaaaagtgataatataataaatataggttactagattaaaaatggtgttccaactcgtgtgctctacatgcggtaaagatatttctcacgaacgatataaattgattatacgaaaaaaatcattaaaggatgtactcgtcagtgtaaagaacgaatgttgtaggttaaaattatctacacaaatagaacctcaacgtaacttaacagtgcaacctctattggatataaactaatatggatccggttaattttatcaagacatatgcgcctagaggttctattatttttattaattataccatgtcattaacaagtcatttgaatccatcgatagaaaaacatgtgggtatttattatggtacgttattatcggaacacttggtagttgaatctacctatagaaaaggagttcgaatagtcccattggatagtttttttgaaggatatcttagtgcaaaagtatacatgttagagaatattcaagttatgaaaatagcagctgatacgtcattaactttattgggtattccgtatggatttggtcataatagaatgtattgttttaaattggtagctgactgttataaaaatgccggtgttgaaacatcgtctaaacgaatattaggtaaagatatttttctgagccaaaacttcacagacgataatagatggataaagatatatgattctaataatttaacattttggcaaattgattaccttaaagggtgagttaatatgcataactactcctccgttgttttttccctcgttctttttcttaacgttgtttgccatcactctcataatgtaaagatattctaaaatggtaaacttttgcatatcggacgcagaaattggtataaatgttgtaattgtattatttcccgtcaatggactagtcacagctccatcagttttatatcctttagagtatttctcactcgtgtctagcattctagagcattccatgatctgtttatcgttgatattggccggaaagatagattttttattttttattatattactattggcaattgtagatataacttctggtaaatatttttctaccttttcaatttcttctattttcaagccggctatatattctgctatattgttgctagtatcaataccttttctggctaagaagtcatatgtggtattcactatatcagttttaactggtagttccattagcctttccacttctgcagaataatcagaaattggttctttaccagaaaatccagctactataataggctcaccgatgatcattggcaaaatcctatattgtaccagattaatgagagcatatttcatttccaataattctgctagttcttgagacattgatttatttgatgaatctagttggttctctagatactctaccatttctgccgcatacaataacttgttagataaaatcagggttatcaaagtgtttagcgtggctagaatagtgggcttgcatgtattaaagaatgcggtagtatgagtaaaccgttttaacgaattatatagtctccagaaatctgtggcgttacatacatgagccgaatgacatcgaagattgtccaatatttttaatagctgctctttgtccattatttctatatttgactcgcaacaattgtagataccattaatcactgattcctttttcgatgccggacaatagcacaattgtttagctttggactctatgtattcagaattaatagatatatctcttaatacagattgcactatacattttgaaactatgtcaaaaattgtagaacgacgctgttctgcagccatttaactttaaataatttacaaaaatttaaaatgagcatccgtataaaaatcgataaactgcgccaaattgtggcatatttttcagagttcagtgaagaagtgtctataaatgtagactcgacggatgagttaatgtatatttttgccgccttgggcggatctgtaaacatttgggccattatacctctcagtgcatcagtgttctaccgaggagccgaaaacattgtgtttaatcttcctgtgtccaaggtaaaatcgtgtttgtgtagttttcacaatgatgccatcatagatatagaacctgatctggaaaataatctagtaaaactttctagttatcatgtagtaagtgtcgattgtaataaggaactgatgcctattaggacagatactactatttgtctaagtatagatcaaaagaaatcttatgtgtttaattttcacaagtatgaagaaaaatgttgtggtagaaccgtcattcatttagaatggttgttgggctttatcaagtgtattagtcagcatcagcatctggctattatgtttaaagatgacaatattattatgaagactcctggtaatactgatgcattttccagggaatattctatgactgaatgttctcaagaactacaaaagttttctttcaaaatagctatctcgtctctcaacaaactacgaggattcaaaaagagagtcaatgtttttgaaactagaatcgtaatggataatgacgataacattctaggaatgttgttttcggatagagttcaatcctttaagatcaacatctttatggcgtttttagattaatactttcaatgagataaatatgggtggcggagtaagtgttgagctccctaaacgggatccgcctccgggagtacccactgatgagatgttattaaacgtggataaaatgcatgacgtgatagctcccgctaagcttttagaatatgtgcatataggaccactagcaaaagataaagaggataaagtaaagaaaagatatccagagtttagattagtcaacacaggacccggtggtctttcggcattgttaagacaatcgtataatggaaccgcacccaattgctgtcgcacttttaatcgtactcattattggaaaaaggatggaaagatatcagataagtatgaagagggtgcagtattagaatcgtgttggccagacgttcacgacactggaaaatgcgatgttgatttattcgactggtgtcagggggatacgttcgatagaaacatatgccatcagtggatcggttcagcctttaataggagtaatagaactgtagagggtcaacaatcgttaataaatctgtataataagatgcaaacattatgtagtaaagatgctagtgtaccaatatgtgaatcatttttgcatcatttacgcgcacacaatacagaagatagcaaagagatgatcgattatattctaagacaacagtctgcggactttaaacagaaatatatgagatgtagttatcccactagagataagttagaagagtcattaaaatatgcggaacctcgagaatgttgggatccagagtgttcgaatgccaatgttaatttcttgctaacacgtaattataataatttaggactttgcaatattgtacgatgtaatactagcgtgaacaacttacagatggataaaacttcctcattaagattgtcatgtggattaagcaatagtgatagattttctactgttcccgtcaatagagcaaaagtagttcaacataatattaaacactcgttcgacctaaaattgcatttgatcagtttattatctctcttggtaatatggatactaattgtagctatttaaatgggtgccgcagcaagcatacagacgacggtgaatacactcagcgaacgtatctcgtctaaattagaacaagaagcgaatgctagtgctcaaacaaaatgtgatatagaaatcggaaatttttatatccgacaaaaccatggatgtaacctcactgttaaaaatatgtgctctgcggacgcggatgctcagttggatgctgtgttatcagccgctacagaaacatatagtggattaacaccggaacaaaaagcatacgtgccagctatgtttactgctgcgttaaacattcagacgagtgtaaacactgttgttagagattttgaaaattatgtaaaacaaacttgtaattctagcgcggtcgtcgataacaaattaaagatacaaaacgtaatcatagatgaatgttacggagccccaggatctccaacaaatttggaatttattaatacaggatctagcaaaggaaattgtgccattaaggcgttgatgcaattgactactaaggccactactcaaatagcacctagacaagttgctggtacaggagttcagttttatatgattgttatcggtgttataatattggcagcgttgtttatgtactatgccaagcgtatgctgttcacatccaccaatgataaaatcaaacttattttagccaataaggaaaacgtccattggactacttacatggacacattctttagaacttctccgatggttattgctaccacggatatgcaaaactgaaaatatattgataatattttaatagattaacatggaagttatcgctgatcgtctagacgatatagtgaaacaaaatatagcggatgaaaaatttgtagattttgttatacacggtctagagcatcaatgtcctgctatacttcgaccattaattaggttgtttattgatatactattatttgttatagtaatttatatttttacggtacgtctagtaagtagaaattatcaaatgttgttggcgttggtggcgctagtcatcacattaactattttttattactttatactataatagtactagactgacttctaacaaacatctcacctgccataaataaatgcttgatattaaagtcttctatttctaacactattccatctgtggaaaataatactctgacattatcgctaattgacacatcggtgagtgatatgcctataaagtaataatcttctttgggcacatataccagtgtaccaggttctaacaacctatttactggtgctcctgtagcatactttttctttaccttgagaatatccatcgtttgcttggtcaatagcgatatgtgattttttatcaaccactcgaaaaagtaattggagtgttcatatcctctacgggctattgtctcatggccgtgtatgaaatttaagtaacacgactgtggtagatttgttctatagagccggttgccgcaaatagatagaactaccaatatgtctgtacaaatgttaaacattaattgattaacagaaaaaacaatgttcgttctgggaatagaaaccagatcaaaacaaaattcgttagaatatatgccacgtttatacattgaatataaaataactacagtttgaaaaataacagtatcatttaaacatttaacttgcggggttaatttcacaactttactgtttttaaactgttcaaaatatagcatcgatccatgagaaatacgtttagccgcctttaatagaggaaatcccaccgcctttctggatctcaccaacgacgatagttctgaccagcaactcatttcttcatcatccacctgttttaacatataataggcaggagatagatatccgtcattgcaatattccttttcgtaggcacacaatctaatattgataaaatctccattctcttctctgcatttattatcttgtttcggtggctgattaggctgtagtcttggtttaggccttggtctatcgttgttgaatctattttggtcattaaatctttcatttcttcctggtatatttctatcacctcgtttggttggatttttgtctatattatcgtttgtaacatcggtacgggtattcatttatcacaaaaaaaacttctctaaatgagtctactgctagaaaacctcatcgaagaagataccatattttttgcaggaagtatatctgagtatgatgatttacaaatggttattgccggcgcaaaatccaaatttccaagatctatgctttctatttttaatatagtacctagaacgatgtcaaaatatgagttggagttgattcataacgaaaatatcacaggagcaatgtttaccacaatgtataatataagaaacaatttgggtctaggagatgataaactaactattgaagccattgaaaactatttcttggatcctaacaatgaagttatgcctcttattattaataatacggatatgactgccgtcattcctaaaaaaagtggtaggagaaagaataagaacatggttatcttccgtcaaggatcatcacctatcttgtgcattttcgaaactcgtaaaaagattaatatttataaagaaaatatggaatccgcatcgactgagtatacacctatcggagacaacaaggctttgatatctaaatatgcgggaattaatgtcctgaatgtgtattctccttccacatccatgagattgaatgccatttacggattcaccaataaaaataaactagagaaacttagtactaataaggaactagaatcgtatagttctagccctcttcaagaacccattaggttaaatgattttctgggactattggaatgtgttaaaaagaatattcctctaacagatattccgacaaaggattgattactataaatggagaatgttcctaatgtatactttaatcctgtgtttatagagcccacgtttaaacattctttattaagtgtttataaacacagattaatagttttatttgaagtattcgttgtattcattctaatatatgtattttttagatctgaattaaatatgttcttcatgcctaaacgaaaaatacccgatcctattgatagattacgacgtgctaatctagcgtgtgaagacgataaattaatgatctatggattaccatggatgacaactcaaacatctgcgttatcaataaatagtaaaccgatagtgtataaagattgtgcaaagcttttgcgatcaataaatggatcacaaccagtatctcttaacgatgttcttcgcagatgatgattcattttttaagtatttggctagtcaagatgatgaatcttcattatctgatatattgcaaatcactcaatatctagactttctgttattattattgatccaatcaaaaaataaattagaagccgtgggtcattgttatgaatctctttcagaggaatacagacaattgacaaaattcacagactctcaagattttaaaaaactgtttaacaaggtccctattgttacagatggaagggtcaaacttaataaaggatatttgttcgactttgtgattagtttgatgcgattcaaaaaagaatcctctctagctaccaccgcaatagatcctattagatacatagatcctcgtcgcgatatcgcattttctaacgtgatggatatattaaagtcgaataaagtgaacaataattaattctttattgtcatcatgaacggcggacatattcagttgataatcggccccatgttttcaggtaaaagtacagaattaattagacgagttagacgttatcaaatagctcaatataaatgcgtgactataaaatattctaacgataatagatacggaacgggactatggacgcatgataagaataattttgaagcattggaagcaactaaactatgtgatgtcttggaatcaattacagatttctccgtgataggtatcgatgaaggacagttctttccagacattgttgaattctgtgagcgtatggcaaacgaaggaaaaatagttatagtagccgcactcgatgggacatttcaacgtaaaccgtttaataatattttgaatcttattccattatctgaaatggtggtaaaactaactgctgtgtgtatgaaatgctttaaggaggcttccttttctaaacgattgggtgaggaaaccgagatagaaataataggaggtaatgatatgtatcaatcggtgtgtagaaagtgttacatcgactcataatattatattttttatctaaaaaactaaaaataaacattgattaaattttaatataatacttaaaaatggatgttgtgtcgttagataaaccgtttatgtattttgaggaaattgataatgagttagattacgaaccagaaagtgcaaatgaggtcgcaaaaaaactgccgtatcaaggacagttaaaactattactaggagaattattttttcttagtaagttacagcgacacggtatattagatggtgccaccgtagtgtatataggatcggctcctggtacacatatacgttatttgagagatcatttctataatttaggaatgattatcaaatggatgctaattgacggacgccatcatgatcctattctaaatggattgcgtgatgtgactctagtgactcggttcgttgatgaggaatatctacgatccatcaaaaaacaactgcatccttctaagattattttaatttctgatgtaagatccaaacgaggaggaaatgaacctagtacggcggatttactaagtaattacgctctacaaaatgtcatgattagtattttaaaccccgtggcatctagtcttaaatggagatgcccgtttccagatcaatggatcaaggacttttatatcccacacggtaataaaatgttacaaccttttgctccttcatattcagctgaaatgagattattaagtatttataccggtgagaacatgagactgactcgagttaccaaatcagacgctgtaaattatgaaaaaaagatgtactaccttaataagatcgtccgtaacaaagtagttgttaactttgattatcctaatcaggaatatgactattttcacatgtactttatgctgaggaccgtgtactgcaataaaacatttcctactactaaagcaaaggtactatttctacaacaatctatatttcgtttcttaaatattccaacaacatcaactgaaaaagttagtcatgaaccaatacaacgtaaaatatctagcaaaaattctatgtctaaaaacagaaatagcaagagatccgtacgcggtaataaatagaaacgtactactgagatatactaccgatatagagtataatgatttagttactttaataaccgttagacataaaattgattctatgaaaactgtgtttcaggtatttaacgaatcatccataaattatactccggttgatgatgattatggagaaccaatcattataacatcgtatcttcaaaaaggtcataacaagtttcctgtaaattttctatacatagatgtggtaatatctgacttatttcctagctttgttagactagatactacagaaactaatatagttaatagtgtactacaaacaggcgatggtaaaaagactcttcgtcttcccaaaatgttagagacggaaatagttgtcaagattctctatcgccctaatataccattaaaaattgttagatttttccgcaataacatggtaactggagtagagatagccgatagatctgttatttcagtcgctgattaatcaattagtagagatgagataagaacattataataatcaataatatatcttatatcttatatcttatatcttgtttagaaaaatgctaatattaaaatagctaacgctagtaatccaatcggaagccatttgatatctataatagggtatctaatttcctgatttaaatagcggacagctatattctcggtagctactcgtttggaatcacaaacattatttacatctaatttactatctgtaatggaaacgtttcccaatgaaatggtacaatccgatacattgcattttgttatatttttttttaaagaggctggtaacaacgcatcgcttcgtttacatggctcgtaccaacaataatagggtaatcttgtatctattcctatccgtactatgcttttatcaggataaatacatttacatcgtatatcgtctttgttagcatcacagaatgcataaatttgttcgtccgtcatgataaaaatttaaagtgtaaatataactattatttttatagttgtaataaaaagggaaatttgattgtatactttcggttctttaaaagaaactgacttgataaaaatggctgtaatctctaaggttacgtatagtctatatgatcaaaaagagattaatgctacagatattatcattagtcatgttaaaaatgacgacgatatcggtaccgttaaagatggtagactaggtgctatggatggggcattatgtaagacttgtgggaaaacggaattggaatgtttcggtcactggggtaaagtaagtatttataaaactcatatagttaagcctgaatttatttcagaaattattcgtttactgaatcatatatgtattcactgcggattattgcgttcacgagaaccgtattccgacgatattaacctaaaagagttatcgggacacgctcttaggagattaaaggataaaatattatccaagaaaaagtcatgttggaacagcgaatgtatgcaaccgtatcaaaaaattactttttcaaagaaaaaggtttgtttcgtcaacaagttggatgatattaacgttcctaattctctcatctatcaaaagttaatttctattcatgaaaagttttggccattattagaaattcatcaatatccagctaacttattttatacagactactttcccatccctccgctgattattagaccggctattagtttttggatagatagtatacccaaagagaccaatgaattaacttacttattaggtatgatcgttaagaattgtaacttgaatgctgatgaacaggttatccagaaggcggtaatagaatacgatgatattaaaattatttctaataacacttccagtatcaatttatcatatattacatccggcaaaaataatatgattagaagttatattgtcgcccgacgaaaagatcagaccgctagatctgtaattggtcccagtacatctatcaccgttaatgaggtaggaatgcccgcatatattagaaatacacttacagaaaagatatttgttaatgcctttacagtggataaagttaaacaactattagcgtcaaaccaagttaaattttactttaataaacgattaaaccaattaacaagaatacgccaaggaaagtttattaaaaataaaatacatttattgcctggtgattgggtagaagtagctgttcaagaatatacaagtattatttttggaagacagccgtctctacatagatacaacgtcatcgcttcatctatcagagctaccgaaggagatactatcaaaatatctcccggaattgccaactctcaaaatgctgatttcgacggagatgaagaatggatgatattggagcaaaatcctaaagccgtaattgaacaaagtattcttatgtatccgacgacgttactcaaacacgatattcatggagcccccgtttatggatctattcaagatgaaatcgtagcagcgtattcattgtttagaatacaagatctttgtttagatgaagtattgaacatcttggggaaatatggaagaaagttcgatcctaaaggtaaatgtaaattcagcggtaaagatatctatacttacttgataggtgaaaagattaattatccgggtctcttaaaggatggtgaaattattgcaaacgacgtagatagtaattttgttgtggctatgaggcatctgtcattggctggactcttatccgatcataagtcgaacgtggaaggtatcaactttattatcaagtcatcttatgtttttaagagatatctatctatttacggttttggggtgacattcaaagatctgagaccaaattcgacgttcactaataaattggaggccatcaacgtagaaaaaatagaacttatcaaagaagcatacgccaaatatctcaacgatgtaagagacgggaaaatagttccattatctaaagctttagaggcggactatgtggaatccatgttatccaacttgacaaatcttaatatccgagagatagaagaacatatgagacaaacgctgatagatgatccagataataacctcctgaaaatggccaaagcgggttataaagtaaatcccacagaactaatgtatattctaggtacttatggacaacagaggattgatggtgaaccagcagagactcgagtattgggtagagtcttaccttactatcttccagactctaaggatccagaaggaagaggttatattcttaattctttaacaaaaggattaacaggttctcaatattacttttcgatgctggttgccagatctcaatctactgatatcgtctgtgaaacatcacgtaccggaacactggctagaaaaatcattaaaaagatggaggatatggtggtcgacggatacggacaagtagttataggtaatacgctcatcaagtacgccgccaattataccaaaattctaggctcagtatgtaaacctgtagatcttatctatccagatgagtccatgacttggtatttggaaattagtgctctgtggaataaaataaaacagggattcgtttactctcagaaacagaaacttgcaaaaaagacattggcgccgtttaatttcctagtattcgtcaaacccaccactgaggataatgctattaaggttaaggatctgtacgatatgattcataacgtcattgatgatgtgagagagaaatacttctttacggtatctaatatagattttatggagtatatattcttgacgcatcttaatccttctagaattagaattacaaaagaaacggctatcactatctttgaaaagttctatgaaaaactcaattatactctaggtggtggaactcctattggaattatttctgcacaggtattgtctgagaagtttacacaacaagccctgtccagttttcacactactgaaaaaagtggtgccgtcaaacaaaaacttggtttcaacgagtttaataacctgactaatttgagtaagaataagaccgaaattatcactctggtatccgatgatatctctaaacttcaatctgttaagattaatttcgaatttgtatgtttgggagaattaaatccaaacatcactcttcgaaaagaaacagataggtatgtagtagatataatagtcaatagattatacatcaagagagcagaaattaccgaattagtcgtcgaatatatgattgaacgatttatctcctttagcgtcattgtaaaggaatggggtatggagacattcattgaggacgaggataatattagatttactgtctacctaaatttcgttgaaccggaagaattgaatcttagtaagtttatgatggttcttccgggtgccgccaacaagggcaagattagtaaattcaagattcctatctctgactatacgggatatgacgacttcaatcaaacaaaaaagctcaataagatgactgtagaactcatgaatctaaaagaattgggttctttcgatttggaaaacgtcaacgtgtatcctggagtatggaatacatacgatatcttcggtatcgaggccgctcgtgaatacttgtgcgaagccatgttaaacacctatggagaagggttcgattatctgtatcagccttgtgatcttctcgctagtttactatgtgctagttacgaaccagaatcagtgaataaattcaagttcggcgcagctagtactcttaagagagctacgttcggagacaataaagcattgttaaacgcggctcttcataaaaagtcagaacctattaacgataatagtagctgccacttttttagcaaggtccctaatataggaactggatattacaaatactttatcgacttgggtcttctcatgagaatggaaaggaaactatctgataagatatcttctcaaaagatcaaggaaatggaagaaacagaagacttttaattcttatcaataacatatttttctatgatctgtcttttaaacgatggattttccacaaatgcgcctctcaagtccctcatagaatgatacacgtataaaaaatatagcataggcgatgactccttatttttagacattagatatgccaaaatcatagccccgcttctatttactcccgcagcacaatgaaccaacacgggctcgtttcgttgatcacatttagataaaaaggcggtcacgtcgtcaaaatatttactaatatcggtagttgtatcatctaccaacggtatatgaataatattaatattagagttaggcaatgtatatttatccatcgtcaaatttaaaacatatttgaacttaacttcagatgatggtgcatccatagcatttttataatttcccaaatacacattattggttacccttgtcattatagtgggagatttggctttgtgcatatctccagttgaacgtagtagtaagtatttatacaaacttttcttatccatttataacgtacaaatggataaaactactttatcggtaaacgcgtgtaatttagaatacgttagagaaaaggctatagtaggcgtacaagcagccaaaacatcaacacttatattctttgttattatattggcaattagtgcgctattactctggtttcagacgtctgataatccagtctttaatgaattaacgagatatatgcgaattaaaaatacggttaacgattggaaatcattaacggatagcaaaacaaaattagaaagtgatagaggtaaacttctagccgctggtaaggatgatatattcgaattcaaatgtgtggatttcggcgcctattttatagctatgcgattggataagaaaacatatctgccgcaagctattaggcgaggtactggagacgcgtggatggttaaaaaggcggcaaaggtcgatccatctgctcaacaattttgtcagtatttgataaaacacaagtctaataatgttattacttgtggtaatgagatgttaaatgaattaggttatagcggttattttatgtcaccgcattggtgttccgattttagtaatatggaatagtgttagataaatgcggtaacaaatgttcctgtaaggaaccataacagcttagatttaacgttaaagatgagcataaacataataaacaaaattacaatcaaacctataacattaatatcaaacaatccaaaaaatgaaatcagtggagtagtaaacgcgtacataactcctggataacgtttagcagctgccgttcctattctagaccaaaaattcggtttcatgttttcgaagcggtgttctgcaacaagtcggggatcgtgttctacatatttggcggcattatccagtatctgcctattgatcttcatttcgttttcgattctggctatttcaaaataaaatcccgatgatagacctccagactttataatttcatctacgatgttcagcgccgtagtaactctaataatataggctgataagctaacatcataccctcctgtatatgtgaatatggtatgatttttgtccattacaagctcggttttaactttattgcctgtaataatttctctcatctgtaggatatctatttttttgtcatgcattgccttcaagacgggacgaagaaacgtaatatcctcaataacgttatcgttttctacaataactacatattctacctttttattttctaactcggtaaaaaaattagaatcccatagggctaaatgtctagcgatatttcttttcgtttcctctgtacacatagtgttacaaaaccctgaaaagaagtgagtatacttgtcatcatttctaatgtttcctccagtccactgtataaacgcataatccttgtaatgatctggatcatccttgactaccacaacatttcttttttctggcataacttcgttgtcctttacatcatcgaacttctgatcattaatatgctcatgaacattaggaaatgtttctgatggaggtctatcaataactggcacaacaataacaggagttttcaccgccgccatttagttattgaaattaatcatatacaactctttaatacgagttatattttcgtctatccattgtttcacatttacatatttcgacaaaaagatataaaatgcgtattccaatgcttctctgtttaatgaattactaaaatatacaaacacgtcactgtctggcaataaatgatatcttagaatattgtaacaatttattttgtattgcacatgttcgtgatctatgagttcttcttcgaatggcataggatctccgaatctgaaaacgtataaataggagttagaataataatatttgagagtattggtaatatataaactctttagcggtataattagtttttttctctcaatttctatttttagatgtgatggaaaaatgactaattttgtagcattagtatcatgaactctaatcaaaatcttaatatcttcgtcacacgttagctctttgaagtttttaagagatgcatcagttggttctacagatggagtaggtgcaacaattttttgttctacacatgtatgtactggagccattgttttaactataatggtgcttgtatcgaaaaactttaatgcagatagcggaagctcttcgccgcgactttctacatcgtaattgggttctaacgccgatctctgaatggatactagttttctaagttctaatgtgattctctgaaaatgtaaatccaattcctccggcattatagatgtgtatacatcggtaaataaaactatagtatccaacgatcccttctcgcaaattctagtcttaaccaaaaaatcgtatataaccacggagatggcgtatttaagagtggattcttctaccgttttgttcttggatgtcatataggaaactataaagtccgcactactgttaagaatgattactaacgcaactatatagttcaaattaagcattttggaaacataaaataactctgtagacgatacttgactttcgaataagtttgcagacaaacgaagaaagaacagacctctcttaatttcagaagaaaactttttttcgtattcctgacgtctagagtttatatcaataagaaagttaagaattagtcggttaatgttgtatttcattacccaagtttgagatttcataatattatcaaaagacatgataatattaaagataaagcgctgactatgaacgaaatagctatatggttcgctcaaaaatatagtcttgttaaacgtggaaacgataactgtatttttaatcacgtcagcggcatctaaattaaatataggtatatttattccacacactctacaatatgccacaccatcttcataataaataaattcgttagcaaaattattaattttagtgaaatagttagcgtcaactttcatagcttccttcaatctaatttgatgctcacacggtgcgaattctactctaacatcccttttccatgcctcaggttcatcgatctctataatatctagttttttgcgtttcacaaacacaggctcgtctctcgcgatgagatctgtatagtaactatgtaaatgataactagatagaaagatgtagctatatagatgacgatcctttaagagaggtataataactttaccccaatcagatagactgttgttatggtcttcggaaaaagaatttttataaatttttccagtattttccaaatatacgtacttaacatctaaaaaatccttaatgataataggaatggataatccgtctattttataaagaaatacatatcgcacattatacttttttttggaaatgggaataccgatgtgtctacataaatatgcaaagtctaaatattttttagagaatcttagttggtccaaattcttttccaagtacggtaatagatttttcatattgaacggtatcttcttaatctctggttctagttccgcattaaatgatgaaactaagtcactatttttataactaacgattacatcacctctaacatcatcatttaccagaatactgatcttcttttgtcgtaaatacatgtctaatgtgttaaaaaaaagatcatacaagttatacgtcatttcatctgtggtattcttgtcattgaaggataaactcgtactaatctcttctttaacagcctgttcaaatttatatcctatatacgaaaaaatagcaaccagtgtttgatcatccgcgtcaatattctgttctatcgtagtgtataacaatcgtatatcttcttctgtgatagtcgatacgttataaaggttgataacgaaaatatttttatttcgtgaaataaagtcatcgtaggattttggacttatattcgcgtctagtagatatgcttttatttttggaatgatctcaattagaatagtctctttagagtccatttaaagttacaaacaactaggaaattggtttatgatgtataatttttttagtttttatagattctttattctatacttaaaaaatgaaaataaatacaaaggttcttgagggttgtgttaaattgaaagcgagaaataatcataaattatttcattatcgcgatatccgttaagtttgtatcgtaatggcgtggtcaattacaaataaagcggatactagtagcttcacaaagatggctgaaatcagagctcatctaaaaaatagcgctgaaaataaagataaaaacgaggatattttcccggaagatgtaataattccatctactaagcccaaaaccaaacgagccactactcctcgtaaaccagcggctactaaaagatcaaccaaaaaggaggaagtggaagaagaagtagttatagaggaatatcatcaaacaactgaaaaaaattctccatctcctggagtcggcgacattgtagaaagcgtggctgctgtagagctcgatgatagcgacggggatgatgaacctatggtacaagttgaagctggtaaagtaaatcatagtgctagaagcgatctttctgacctaaaggtggctaccgacaatatcgttaaagatcttaagaaaattattactagaatctctgcagtatcgacggttctagaggatgttcaagcagctggtatctctagacaatttacttctatgactaaagctattacaacactatctgatctagtcaccgagggaaaatctaaagttgttcgtaaaaaagttaaaacttgtaagaagtaaatgcgtgcacttttttataaagatggtaaactctttaccgataataattttttaaatcctgtatcagacgataatccagcgtatgaggttttgcaacatgttaaaattcctactcatttaacagatgtagtagtatatgaacaaacgtgggaagaggcattaactagattaatttttgtgggaagcgattcaaaaggacgtagacaatacttttacggaaaaatgcatgtacagaatcgcaacgctaaaagagatcgtatttttgttagagtatataacgttatgaaacgaattaattgttttataaacaaaaatataaagaaatcgtccacagattccaattatcagttggcggtttttatgttaatggaaactatgttttttattagatttggtaaaatgaaatatcttaaggagaatgaaacagtagggttattaacactaaaaaataaacacatagaaataagtcccgatgaaatagttatcaagtttgtaggaaaggacaaagtttcacatgaatttgttgttcataagtctaatagactatataaaccgctattgaaactgacggatgattctagtcccgaagaatttctgttcaacaaactaagtgaacgaaaggtatacgaatgtatcaaacagtttggtattagaatcaaggatctccgaacgtatggagtcaattatacgtttttatataatttttggacaaatgtaaagtccatatctcctcttccgtcaccaaaaaagttaatagcgttaactatcaaacaaactgctgaagtggtaggtcatactccatcaatttcaaaaagagcttacatggcaacgactattttagaaatggtaaaggataaaaattttttagatgtagtatctaaaactacgttcgatgaattcctatctatagtcgtagatcacgttaaatcatctacggatggatgatatagatctttacacaaataattacaagaccgataaatggaaatggataagcgtataaaatctctcgcaatgacagctttcttcggagagctaaacacattagatattatggcattgataatgtctatatttaaacgccatccaaacaataccattttttcagtggataaggatggtcagtttatgattgatttcgaatacgataattataaggcttctcaatatttggatctgaccctcactccgatatctggagatgaatgcaagactcacgcatcgagtatagccgaacaattggcgtgtgcggatattattaaagaggatattagcgaatatatcaaaactactccccgtcttaaacgatttataaaaaaataccgcaatagatcagatactcgcatcagtcgagatacagaaaagcttaaaatagctctagctaaaggcatagattacgaatatataaaagacgcttgttaataagtaaatgaaaaaaaactagtcgtttataataaaacacgatatggatgccaacgtagtatcatcttctactattgcaacgtatatagacgctttagcgaagaatgcttcagaattagaacagaggtctaccgcatacgaaataaataatgaattggaactagtatttattaagccgccattaattactttgacaaatgtagtgaatatctctacgattcaggaatcgtttattcgatttaccgttactaataaggaaggtgttaaaattagaactaagattccattatctaaggtacatggtctagatgtaaaaaatgtacagttagtagatgctatagataacatagtttgggaaaagaaatcattagtgacggaaaatcgtcttcacaaagaatgcttgttgagactatcgacagaggaacgtcatatatttttggattacaagaaatatggatcctctatccgactagaattagtcaatcttattcaagcaaaaacaaaaaactttacgatagactttaagctaaaatattttctaggatccggtgcccagtctaaaagttctttattacacgctattaatcatccaaagtcaaggcctaatacatctctggaaatagaattcacacctagagacaatgaaaaagttccatatgatgaactaataaaggaattgacgactctatcacgtcatatatttatggcttctccagagaatgtaattctttctccgcctattaacgcacctataaagacttttatgttgcctaaacaagatatagtaggtctggatctggaaaatctatacgctgtaactaagactgacggcattcctataactatcagagttacatcaaacgggttgtattgttattttacacatcttggttatattattagatatcctgttaagagaataatagattccgaagtagtagtctttggtgaggcagttaaggataagaactggaccgtatatctcattaagctaatagagcctgtgaatgcaatcaatgatagactagaagaaagtaagtatgttgaatctaaactagtggatatttgtgatcggatagtattcaagtcaaagaaatacgaaggtccgtttactacaactagtgaagtcgtcgatatgttatctacatatttaccaaagcaaccagaaggtgttattctgttctattcaaagggacctaaatctaacattgattttaaaattaaaaaggaaaatactatagaccaaactgcaaatgtagtatttaggtacatgtccagtgaaccaattatctttggagaatcgtctatctttgtagagtataagaaatttagcaacgataaaggctttcctaaagaatatggttctggtaagattgtgttatataacggcgttaattatctaaataatatctattgtttggaatatattaatacacataatgaagtgggtattaagtccgtggttgtacctattaagtttatagcagaattcttagttaatggagaaatacttaaacctagaatcgataaaaccatgaaatatattaactcagaagattattatggaaatcaacataatatcatagtcgaacatttaagagatcaaagcatcaaaataggagatatctttaacgaggataaactatcggatgtgggacatcaatacgccaataatgataaatttagattaaatccagaagttagttattttacgaataaacgaactagaggaccgttgggaattttatcaaactacgtcaagactcttcttatttctatgtattgttccaaaacatttttagacgattccaacaaacgaaaggtattggcgattgattttggaaacggtgctgacctggaaaaatacttttatggagagattgcgttattggtagcgacggatccggatgctgatgctatagctagaggaaatgaaagatacaacaaattaaactctggaattaaaaccaagtactacaaatttgactacattcaggaaactattcgatccgatacatttgtctctagtgtcagagaagtattctattttggaaagtttaatatcatcgactggcagtttgctatccattattcttttcatccgagacattatgctaccgtcatgaataacttatccgaactaactgcttctggaggcaaggtattaatcactaccatggacggagacaaattatcaaaattaacagataaaaagacttttataattcataagaatttacctagtagcgaaaactatatgtctgtagaaaaaatagctgatgatagaatagtggtatataatccatcaacaatgtctactccaatgactgaatacattatcaaaaagaacgatatagtcagagtgtttaacgaatacggatttgttcttgtagataacgttgatttcgctacaattatagaacgaagtaaaaagtttattaatggcgcatctacaatggaagatagaccgtctacaaaaaactttttcgaactaaatagaggagccattaaatgtgaaggtttagatgtcgaagacttacttagttactatgttgtttatgtcttttctaagcggtaaataataatatggtatgggttctgatatccccgttctaaatgcattaaataattccaatagagcgatttttgttcctataggaccttccaactgtggatactctgtattgttaatagatatattaatacttttgtcgggtaacagaggttctacgtcttctaaaaataaaagtttgataacatctggcctgttcataaataaaaacttggcgattctatatatactcttattatcaaatctagccattgtcttatagatgtgagctactgtaggtgtaccatttgattttctttctaatactatatatttctctcgaagaagttcttgcacatcatctgggaataaaatactactgttgagtaaatcagttattttttttatatcgatattgatggacatttttatagttaaggataataagtatcccaaagtcgataacgacgataacgaagtatttatacttttaggaaatcacaatgactttatcagattaaaattaacaaaattaaaggagcatgtatttttttctgaatatattgtgactccagatacatatggatctttatgcgtcgaattaaatgggtctagttttcagcacggtggtagatatatagaggtggaggaatttatagatgctggaagacaagttagatggtgttctacatccaatcatatatctgaagatatacccgaagatatacacactgataaatttgtcatttatgatatatacacttttgacgctttcaagaataaacgattggtattcgtacaggtacctccgtcgttaggagatgatagtcatttgactaatccgttattgtctccgtattatcgtaattcagtagccagacaaatggtcaatgatatgatttttaatcaagattcatttttaaaatatttattagaacatctgattagaagccactatagagtttctaaacatataacaatagttagatacaaggataccgaagaattaaatctaacgagaatatgttataatagagataagtttaaggcgtttgtattcgcttggtttaacggcgtttcggaaaatgaaaaggtactagatacgtataaaaaggtatctaatttgatataatgaattcagtgactgtatcacacgcgccatatactattacttatcacgatgattgggaaccagttatgagtcaattggtagagttttataacgaagtagccagttggctgctacgagacgagacgtcgcctattcctgataagttctttatacagttgaaacaaccgcttagaaataaacgagtatgtgtgtgtggtatagatccgtatccgaaagatggaactggtgtaccgttcgaatcaccaaattttacaaaaaaatcaattaaggagatagcttcatctatatctagattaaccggagtaattgattataaaggttataaccttaatataatagacggggttataccctggaattattacttaagttgtaaattaggagaaacaaaaagtcacgcgatctactgggataagatttccaagttactgctgcagcatataactaaacacgttagtgttctttattgtttgggtaaaacagatttctcgaatatacgggcaaagttagaatccccggtaactaccatagtgggatatcatccagcggctagagaccgccaattcgagaaagatagatcatttgaaattatcaacgttttactggaattagacaacaaggtacctataaattgggctcaagggtttatttattaatgctttagtgaaattttaacttgtgttctaaatggatgcggctattagaggtaatgatgttatctttgtccttaagactataggtgtcccatcagcatgtagacaaaatgaagatccaagattcgtagaagcatttaaatgcgacgagttaaaaagatatattgataataatccagaatgtacactattcgaaagtcttagggatgaggaagcatactctatagtcagaattttcatggatgtagatttagacgcgtgtctagacgaaatagattatttaacggctattcaagattttattatcgaggtgtcaaactgtgtagctagattcgcgtttacagaatgcggtgccattcatgaaaatgtaataaaatccatgagatctaatttttcattgactaagtctacaaatagagataaaacaagttttcatattatctttttagacacgtataccactatggatacattgatagctatgaaacgaacactattagaattaagtagatcatctgaaaatccactaacaagatcgatagacactgccgtatataggagaaaaacaactcttcgggttgtaggtactaggaaaaatccaaattgcgacactattcatgtaatgcaaccaccgcatgataatatagaagattacctattcacttacgtggatatgaacaacaatagttattacttttctctacaacgacgattggaggatttagttcctgataagttatgggaaccagggtttatttcattcgaagacgctataaaaagagtttcaaaaatattcattaattctataataaactttaatgatctcgatgaaaataattttacaacggtaccactggtcatagattacgtaacaccttgtgcattatgtaaaaaacgatcgcataaacatccgcatcaactatcgttggaaaatggtgctattagaatttacaaaactggtaatccacatagttgtaaagttaaaattgttccgttggatggtaataaactgtttaatattgcacaaagaattttagacactaactctgttttattaaccgaacgaggagactatatagtttggattaataattcatggaaatttaacagcgaagaacccttgataacaaaactaattctgtcaataagacatcaactacctaaggaatattcaagcgaattactctgtccgaggaaacgaaagactgtagaagctaacatacgagacatgttagtagattcagtagagaccgatacctatccggataaacttccgtttaaaaatggtgtattggacctggtagacggaatgttttactctggagatgatgctaaaaaatatacgtgtactgtatcaaccggatttaaatttgacgatacaaagttcgtcgaagacagtccagaaatggaagagttaatgaatatcattaacgatatccaaccattaacggatgaaaataagaaaaatagagagctatatgaaaaaacattatctagttgtttatgtggtgctaccaaaggatgtttaacattcttttttggagaaactgcaactggaaagtcgacaaccaaacgtttgttaaagtctgctatcggtgacctgtttgttgagacgggtcaaacaattttaacagatgtattggataaaggacctaatccatttatcgctaacatgcatttgaaaagatctgtattctgtagcgaactacctgattttgcctgtagtggatcaaagaaaattagatctgataatattaaaaagttgacagaaccttgtgtcattggaagaccgtgtttctccaataaaattaataatagaaaccatgctacaatcattatcgatactaattacaaacctgtctttgataggatagataacgcattaatgagaagaattgccgtcgtgcgattcagaacacacttttctcaaccttctggtagagaggctgctgaaaataatgacgcgtacgataaagtcaaactattagacgaggggttagatggtaaaatacaaaataatagatatagatttgcatttctatacttgttggtgaaatggtacaaaaaatatcatgttcctattatgaaactatatcctacacccgaagagattcctgactttgcattctatctcaaaataggtactctgttagtatctagctctgtaaagcatattccattaatgacggacctctccaaaaagggatatatattgtacgataatgtggttactcttccgttgactactttccaacagaaaatatccaagtattttaattctagactatttggacacgatatagagagcttcatcaatagacataagaaatttgccaatgttagtgatgaatatctgcaatatatattcatagaggatatttcatctccgtaaatatatgctcatatatttatagaagatatcacatatctaaatgaataccggaattatagatttatttgataatcatgttgatagtataccaactatattacctcatcagttagctactctagattatctagttagaactatcatagatgagaacagaagcgtgttattgttccatattatgggatcaggtaaaacaataatcgctttgttgttcgccttggtagcttccagatttaaaaaggtttacattctagtgccgaacatcaacatcttaaaaattttcaattataatatgggtgtagctatgaacttgtttaatgacgaattcatagctgagaatatctttattcattccacaacaagtttttattctcttaattataacgataacgtcattaattataacggattatctcgctacaataactctatttttatcgttgatgaggcacataatatctttgggaataatactggagaacttatgaccgtgataaaaaataaaaacaagattccttttctactattgtctggatctcccattactaacacacctaatactctgggtcatattatagatttaatgtccgaagagacgatagattttggtgaaattattagtcgtggtaagaaagtaattcagacacttcttaacgaacgaggtgtgaatgtacttaaggatttgcttaaaggaagaatatcatattacgaaatgcctgataaagatctaccaacgataagatatcacggacgtaagtttctagatactagagtagtatattgtcacatgtctaaacttcaagagagagattatatgattactagacgacagctatgttatcatgaaatgtttgataaaaatatgtataacgtgtcaatggcagtattgggacaacttaatctgatgaataatttagatactttatttcaggaacaggataaggaattgtacccaaatctgaaaataaataatggcgtgttatacggagaagaattggtaacgttaaacattagttccaaatttaagtactttatcaatcggatacagacactcaacggaaaacattttatatacttttctaattctacatatggtggattggtaattaaatatatcatgctcagtaatggatattctgaatataatggttctcagggaactaatccacatatgataaacggcaaaccaaaaacatttgctatcgttactagtaaaatgaaatcgtctttagaggatctattagatgtgtataattctcctgaaaacgatgatggtagtcaattgatgtttttgttttcatcaaacattatgtccgaatcctatactctgaaagaggtaaggcatatttggtttatgactatcccagatactttttctcaatacaaccaaattcttggacgatctattagaaaattctcttacgccgatatttctgaaccagttaatgtatatcttttagccgccgtatattccgatttcaatgacgaagtaacgtcattaaacgattacacacaggatgaattaattaatgttttaccatttgacatcaaaaagctgttgtatctaaaatttaagacgaaagaaacgaatagaatatactctattcttcaagagatgtctgaaacgtattctcttccaccacatccatcaattgtaaaagttttattgggagaattggtcagacaatttttttataataattctcgtattaagtataacgactccaagttacttaaaatggttacatcagttataaaaaataaagaagacgctaggaattacatagatgatattgtaaacggtcacttctttgtatcgaataaagtatttgataaatctcttttatacaaatacgaaaacgatattattacagtaccgtttagactttcctacgaaccatttgtttggggagttaactttcgtaaagaatataacgtggtatcttctccataaaactgatgagatatataaagaaataaatgtcgagctttgttaccaatggatacctttccgttacattggaacctcatgagctgacgttagacataaaaactaatattaggaatgccgtatataagacgtatctccatagagaaattagtggtaaaatggccaagaaaatagaaattcgtgaagacgtggaattacctctcggcgaaatagttaataattctgtagttataaacgttccgtgtgtaataacctacgcgtattatcacgttggggatatagtcagaggaacattaaacatcgaagatgaatcaaatgtaactattcaatgtggagatttaatctgtaaactaagtagagattcgggtactgtatcatttagcgattcaaagtactgcttttttcgaaatggtaatgcgtatgacaatggcagcgaagtcactgccgttctaatggaggctcaacaaggtatcgaatctagttttgtttttctcgcgaatatcgtcgactcataagaaagagaatagcggtaagtataaacacgaatactatggcaataattgcgaatgttttattcccttcgatatatttttgataatatgaaaaacatgtctctctcaaatcggacaaccatctcataaaatagttctcgcgcgctggagaggtagttgctgctcgtataatctccccagaataatatacttgcgtgtcgtcgttcaatttatacggatttctatagttctctgttatataatacggttttccatcatgattagacgacgacaatagtgttctaaatttagatagttgatcagaatgaatgtttattggcgttggaaaaattatccatacagcgtctgcagagtgcttgatagttgttcctagatatgtaaaataatccaacgtactaggtagcaaattgtctagataaaatactgaatcaaacggcgcagacgtattagcggatctaatggaatccaattgattgactatcttttgaaaatatacatttttatgatccgatacttgtaagaatatagaaataatgataagtccatcatcgtgtttttttgcctcttcataagaactatattttttcttattccaatgaacaagattaatctctccagagtatttgtacacatctatcaagtgattggatccataatcgtcttcctttccccaatatatatgtagtgatgataacacatattcattggggagaaaccctccacttatatatcctcctttaaaattaatccttactagttttccagtgttctggatagtggttggtttcgactcattataatgtatgtctaacggcttcaatcgcgcgttagaaattgcttttttagtttctatattaataggagatagttgttgcggcatagtaaaaatgaaatgataactgtttaaaaatagctcttagtatgggaattacaatggatgaggaagtgatatttgaaactcctagagaattaatatctattaaacgaataaaagatattccaagatcaaaagacacgcatgtgtttgctgcgtgtataacaagtgacggatatccgttaataggagctagaagaacttcattcgcgttccaggcgatattatctcaacaaaattcagattctatctttagagtatccactaaactattacggtttatgtactacaatgaactaagagaaatctttagacggttgagaaaaggttctatcaacaatatcgatcctcacttcgaagagttaatattattgggtggtaaactagataaaaaggaatctattaaagattgtttaagaagagaattaaaagaggaaagtgatgaacgtataacagtaaaagaatttggaaatgtaattctaaaacttacaacacgggataaattatttaataaagtatatataagttattgcatggcgtgttttattaatcaatcgttggaggatttatcgcatactagtatttacaatgtagaaattagaaagattaaatcattaaatgattgtattaacgacgataaatacgaatatctgtcttatatttataatatgctagttaatagtaaatgaacttttacagatctagtataattagtcagattattaagtataatagacgactagctaagtctattatttgcgaggatgactctcaaattattacactcacggcattcgttaaccaatgcctatggtgtcataaacgagtatccgtgtccgctattttattaactactgataacaaaatattagtatgtaacagacgagatagttttctctattctgaaataattagaactagaaacatgtttagaaagaaacgattatttctgaattattccaattatttgtccaaacaggaaagaagtatactatcgtcatttttttctctatatccagctactgctgataatgatagaatagatgctatttatccgggtggcatacccaaaaggggtgagaatgttccagagtgtttatccagggaaattaaagaagaagttaatatagacaattcttttgtattcatagacactcggttttttattcatggcatcatagaagataccattattaataaattttttgaggtaatcttctttgtcggaagaatatctctaacgagtgatcaaatcattgatacatttaaaagtaatcatgaaatcaaggatctaatatttttagatccgaattcaggtaatggactccaatacgaaattgcaaaatatgctctagatactgcaaaactcaaatgttatggccatagaggatgttattacgaatcattaaaaaaattaactgaggatgattgattagaaaatataaattaatttaccatcgtgtatttttataacgggattgtccggcatatcatgtagatagttaccgtctacatcgtatactcgaccatctacgcctttaaatcctctatttattgacattaatctattagaattggaataccaaatattagtaccctcaattagtttattggtaatattttttttagacgatagatcgatggctcttgaaaccaaggttttccaaccggactcattgtcgatcggtgagaagtctttttcattagcatgaatccattctaatgatgtatgtttaaacactctaaacaattggacaaattcttttgatttgctttgaatgatttcaaataggtcttcgtctacagtaggcataccattagataatctagccattataaagtgcacgtttacatatctacgttctggaggagtaagaacgtgactattgagacgaatggctcttcctactatctgacgaagagacgcctcgttccaagtcatatctagaatgaagatatcattgattgagaagaagctaataccctcgcctccactagaagagaatacgcatgttttaatgcattctccgttagtgtttgattcttggttaaactcagccaccgccttgattctagtatcttttgttctagatgagaactctatattagagataccaaagactttgaaatatagtaataagatttctattcctgactgattaacaaatggttcaaagactagacatttaccatgggatgctaatattcccaaacatacatctataaatttgacgcttttctcttttaattcagtaaatagagagatatcagccgcactagcatcccctttcaatagttctccctttttaaaggtatctaatgcggatttagaaaactctctatttcttaatgaatttttaaaatcattatatagtgttgctatctcttgcgcgtattcgcccggatcacgattttgtctttcaggaaagctatcgaacgtaaacgtagtagccatacgtctcagaattctaaatgatgatatacctgtttttatttcagcgagtttagccttttgataaatttcttcttgctttttcgacatattaacgtatcgcattaatactgttttcttagcgaatgatgcagacccttctacgtcatcaaaaatagaaaactcgttattaactatgtacgaacataggcctcctagtttggagactaattctttctcatcaactagacgtttattctcaaatagcgattggtgttgtaaggatcctggtcgtagtaagttaaccaacatggtgaattcttgcacactattgacgataggtgtagccgataaacaaatcatcttatggttttttaacgcaatggttttagataaaaaattatatactgaacgagtaggacggatcttaccatcttctttgattaatgatttagaaatgaagttatgacattcatcaataatgacgcatattctactcttggaattaatagttttgatattagtaaaaaatttatttctaaaattttgatcatcgtaattaataaaaatacaatccttcgttatctctggagcgtatctgagtatagtgttcatccaaggatcttctatcaaagcctttttcaccaataagataatagcccaattcgtataaatatccttaagatgtttgagaatatatacagtagtcattgttttaccgacacccgtttcatggaacaataaaagagaatgcatactgtctaatcctaagaaaactcttgctacaaaatgttgataatccttgaggcgtactacgtccgaccccatcatttcaacaggcatattagtagttctgcgcaatgcataatcgatataggccgcgtgtgatttactcatttatgagtgataagtaataactatgttttaaaaatcacagcagtagtttaactagtcttctctgatgtttgttttcgatacttttcgaatcagaagtcatactagaataaagcagcgagtgaacgtaatagagagcttcgtatactctattcgaaaactctaagaacttattaatgaattccgtatccactggatcgtttaaaatactaaattgaacactgttcacatccttccaagaagaagacttagtgacggacttaacatgagacataaataaatccaaattttttttacaaacatcactagccaccataatggcgctatctttcaaccagctatcgcttacgcattttagcagtctaacatttttaaagagactacaatatattctcatagtatcgattacacctctaccgaataaagttggaagtttaataatacaatatttttcgtttacaaaatcaaataatggtcgaaacacgtcgaaggttaacatcttataatcgctaatgtatagattgttttcagtgagatgattattagatttaatagcatctcgttcacgtttgaacagtttattgcgtgcgctgaggtcggcaactacggcgtccgctttagtactcctcccataatactttacgctattaatctttaaaatttcatagactttatctagatcgctttctggtaacatgatatcatgtgtaaaaagttttaacatgtcggtcggcattctatttagatcattaactctagaaatctgaagaaagtaattagctccgtattccagactaggtaatgggcttttacctagagacagattaagttctggcaatgtttcataaaatggaagaaggacatgcgttccctcccggatattttttacaatttcatccatttacaactctatagtttgttttcattattattagttattatctcccataatcttggtaatacttaccccttgatcgtaagataccttatacaggtcattacatacaactaccaattgtttttgtacataatagattggatggttgacatccatggtggaataaactactcgaacagatagtttatctttccccctagatacattggccgtaatagttgtcggcctaaagaatatctttggtgtaaagttaaaagttagggttcttgttccattattgctttttgtcagtagttcattataaattctcgagatgggtccgttctctgaatatagaacatcatttccaaatctaacttctagtctagaaataatatcggtcttattcttaaaatctattcccttgatgaagggatcgttaatgaacaaatccttggcctttgattcggctgatctattatctccgttatagacgttacgttgactagtccaaagacttacaggaatagatgtatcgatgatgttgatactatgtgatatgtgagcaaagattgttctcttagtggcatcactatatgttccagtaatggcggaaaactttttagaaatgttatatataaaagaattttttcgtgttccaaacattagcagattagtatgaagataaacactcatattatcaggaacattatcaatttttacatacacatcagcatcttgaatagaaacgataccatcttctggaacctctacgatctcggcagactccggataaccagtcggtgggccatcactaacaataactagatcatccaacaatctactcacatatgcatctatataatctttttcatcttgtgagtaccctggatacgaaataaatttattatccgtatttccataataaggtttagtataaacagagagcgatgttgccgcatgaacttcagttacagtcgccgttggttggtttatttgacctattactctcctaggtttctctataaacgatggtttaatttgtacattcttaaccatatatccaataaagctcaattcaggaacataaacaaattctttgttgaacgtttcaaagtcgaacgaagagtcacgaataacgatatcggatactggattgaaggttaccgttacggtaatttttgaatcggatagtttaagactgctgaatgtatcttccacatcaaacggagttttaatataaacgtatactgtagatggttctttaatagtgtcattaggagttaggccaatagaaatatcattaagttcactagaatatccagagtgtttcaaagcaattgtattattgatacaattattatataattcttcgccctcaatttcccaaataacaccgttacacgaagagatagatacgtgattaatacatttatatccaacatatggtacgtaaccgaatcttcccatacctttaacttctggaagttccaaactcagaaccaaatgattaagcgcagtaatatactgatccctaatttcgaagctagcgatagcctgattgtctggaccatcgtttgtcataactccggatagagaaatatattgcggcatatataaagttggaatttgactatcgactgcgaagacattagaccgtttaatagagtcatccccaccgatcaaagaattaatgatagtattattcattttctatttaaaatggaaaaagcttacaataaactccgtagagaaatatctataatttgtgagttttccttaaagtaacagcttccgtaaacgccgtctttatctcttagtaagtttattgtatttataaccttttccttatcttcatagaatactaaaggcaacaaagaaatttttggttcttctctaagagctacgtgagacttaaccatagaagccaacgaatccctacatattttagaacagaaataccctacttcaccacccttgtatgtctcaatactaataggtctaaaaaccaaatcttgattacaaaaccaacacttatcaattacactatttgtcttaatagacacatctgccatagatttataatactttggtagtatacaagcgagtgcttcttctttagcgggcttaaagactgctttaggtgctgaaataaccacatctggaaggcttactcgcttagccatttaattacggaactatttttttatacttctaatgagcaagtagaaaacctctcatctacaaaaacgtactcgtgtccataatcctctaccatagtaacacgttttttagatctcatatgtgctaaaaagttttcccatactaattggttactattatttttcgtataatttttaacagtttgaggttttagatttttagttacagaagtgatatcgaatattttatccaaaaagaatgagtaattaattgtcttagaaggagtgttttcttggcaaaagaataccaagtgcttaaatatttctactacttcattaatcttttctgtactcagattcagtttctcatcttttacttgattgattatttcaaagactaacttataatcctttttatttattctctcgttagccttaagaaaactagatacaaaatttgcatctacatcatccgtggatatttgatttttttccatgatatccaagagttccgagataatttctccagaacattgatgagacaataatctccgcaatacatttctcaaatgaataagtttattagacacgtggaagtttgactttttttgtacctttgtacatttttgaaataccgactcgcaaaaaatacaatattcatatccttgttcagatactataccgttgtgtctacaaccgctacataatcgtagattcatgttaacactctacgtatctcgtcgtccaatattttatataaaaacattttatttctagacgttgccagaaaatcctgtaatatttttagttttttgggctgtgaataaagtatcgccctaatatggttaccgtcctccgccaatatagtagttaaattatccgcacatgcagaagaacaccgcttaggcggattcagtacaatgttatatttttcgtaccaactcatttaaatatcataatctaaaatagttctgtaatatgtctagcgctaatatattgatcataatcctgtgcataaattaagatacaacaatgtctcgaaatcatcgacatggcttcttccatagttagaagatcgtcgtcaaagttagcaacgtgattcatcaacatttgctgttttgaggcagcaaatactgaaccatcgccattcaaccattcataaaaaccatcgtctgaatccattgataatttcttgtactggtttttgagagctcgcatcaatctagcatttctagctcccggattgaaaacagaaagaggatcgtacatccagggtccattttctgtaaatagaatcgtataatgtcccttcaagaagatatcagacgatccacaatcaaagaattggtctccgagtttgtaacaaactgcggactttaacctatacatgataccgtttagcataatttctggtgatacgtcaatcggagtatcatctattagagatctaaagccggtgtaacattctccaccaaacatattcttattctgacgtcgttctacataaaacatcattgctccattaacgataacaggggaatgaacagcactacccatcacattagttcccaatggatcaatgtgtgtaactccagaacatcttccatatcctatgttaggaggagcgaacaccactcttccactattgccatcgaatgccatagaataaatatccttggaattgatagaaatcggactgtcggatgttgtgatcatcttcataggattaacaacgatgtatggtgccgcctgaagtttcatatcgtaactgatgccgtttataggtctagccacagaaaccaacgtaggtctaaatccaactatagacaaaatagaagccaatatctgttcctcatctgtcataacttgagagcatccagtatgaataatcttcattagatggggatctaccgcatcatcatcgttacaataaaaaattcccattctaatgttcataattgcttttctaatcatggtatgcatgtttgctctctgaatctctgtggaaattagatctgatacacctgtaatcactatcggattatcctccgtaagacgattaaccaacaacatataattataagactttacttttctaaattcataaagttgctggattaggctataggtgtctccatgtacatacgcgttctcgagcgcaggaagtttaataccgaatagtgccatcagaataggatgaatatagtaattagtttctggttttctataaataaaagacaaatcttgtgaactagacatatcggtaaaatgcatggattggaatcgtgtagtcgacagaagaatatgatgattagatggagagtatattttatctaactctttgagttggtcaccgattctaggactagctcgagaatgaataagtactaaaggatgagtacatttcacagaaacactagcattgttcaatgtgctctttacatgggtaaggagttgaaatagctcgtttctatttgttctgacaatatttagtttattcataatgttaagcatatcctgaatagtaaagttagatgtgtcatacttgttagtagttagatatttagcaattgcattcccatcatttctcaatctcgtactccaatcatgtgtagatgctacttcatctatagaaaccatacaatcctttttgataggctgttgagattgattatttcctgcacgtttaggtttggtacgttgatttctagcccctgcggatataaagtcatcgtctacaatttgggacaatgaattgcatacactacaagacaaagatttatcagaagtgtgaatatgatcttcatctaccaaagaaagagtttgattagtataactagattttagtcctgcgttagatgttaaaaaaacatcgctattgaccacggcttccattatttatattcgtagtttttactcgaaagcgtgattttaatatccaatcttattacttttggaatcgttcaaaacctttgactagttgtagaatttgatctattgccctacgcgtatactcccttgcatcatatacgttcgtcaccagatcgtttgtttcggcctgaagttggtgcatatctttttcaacactcgacatgagatccttaagggccatatcgtctagattttgttgagatgctgctcctggatttggattttgttgtgctgttgtacatactgtaccaccagtaggtgtaggagtacatacagtggccacaataggaggttgaggaggtgtaaccgttggagtagtacaagaaatatttccatccgattgttgtgtacatgtagttgttggtaacgtctgagaaggttgggtagatggcggcgtcgtcgttttttgatctttattaaatttagagataatatcctgaacagcattgctcggcgtcaacgctggaaggagtgaactcgccggcgcatcagtatcttcagacagccaatcaaaaagattagacatatcagatgatgtattagtttgttgtcgtggttttggtgtaggagcagtactactaggtagaagaataggagccggtgtagctgttggaaccggctgtggagttatatgaatagttggttgtagcggttggataggctgtctgctggcggccatcatattatctctagctagttgttctcgcaactgtctttgataatacgactcttgagactttagtcctatttcaatcgcttcatcctttttcgtatccggatccttttcttcagaataatagattgacgactttggtgtagaggattctgccagcccctgtgagaacttgttaaagaagtccatttaaggctttaaaattgaattgcgattataagattaaatggcagacacagacgatattatcgactatgaatccgatgatctcactgaatacgaggatgatgaagaagaggaagaagatggagagtcactagaaactagtgatatagatcccaaatcttcttataagattgtagaatcagcatccactcatatagaagatgcgcattccaatcttaaacatatagggaatcatatatctgctcttaaacgacgctatactagacgtataagtctatttgaaatagcgggtataatagcagaaagctataacttgcttcaacgaggaagattacctctagtttcagaattttctgacgaaacgatgaagcaaaatatgctacatgtaattatacaagagatagaggagggttcttgtcctatagtcatcgaaaagaacggagaattgttgtcggtaaacgattttgacaaagatggtctaaaattccatctagactatattatcaaaatttggaaacttcaaaaacgatattagaatttatacgaatatcgttctctaaatgtcacaatcaagtctcgcatgttcagcaatttattgtcgtactttatatcgtgttcattaacgatatcttgcaaaatagtaatgattctatcttccttcgatagatattcttcagagattattgtcttatattctttcttgttatcagatatgaatttgataagactttgaacattattgatacccgtctgtttaattttttctacagatattttagttttggcagattctatcgtatctgtcaatagacatccaacatcgacattcgacgtcaattgtctataaatcaacgtataaattttagaaataacattagcgaattgttgtgcattgatgtcgttattctgaaacagtatgattttaggtagcattttcttaacaaagagaacgtatttattgttactcagttgaacagatgatatatccagattactaacgcatctgattccgtataccaaactttcagaagaaatggtatacaattgtttgtattcattcaatgtctctttttcagaaattagtttagagtcgaatactgcaataattttcaagagatagttttcatcagataagattttatttagtgtagatatgataaaactattgttttgttggagaacttgatacgccgcgttctctgtagtcgacgctctcaaatgggaaacaatctccattatttttttggaatcggatacaatatcttcggtatcttgacgcagtctagtatacatagagttaagagagattagagtttgtacattaagcaacatgtctctaaatgtggctacaaacttttccttttccacatcatctagtttattatataccgatttcacaacggcaccagatttaaggaaccagaatgaaaaactctgataactacaatatttcatcatagttacgattttatcatcttctatagttggtgtgatagcgcatacctttttctccaagactggaaccaacgtcataaaaatgtttaaatcaaaatccatatcaacatctgatgcgctaagaccagtctcgcgttcaagattatctttactaatggtgacgaactcatcgtataaaactctaagtttgtccattatttatttacagatttagttgtttaatttatttgtgctcttccagagttgggatagtatttttctaacgtcggtattatattattaggatctacgttcatatgtatcataatattaatcatccacgttttgataaatctatctttagcttctgaaataacgtatttaaacaaaggagaaaaatatttagctacggcatcagacgcaataacattttttgtaaatgtaacatatttagacgacagatcttcgttaaaaagttttccatctatgtagaatccatcagttgttaacaccattcccgcgtcagattgaataggagtttgaatagtttgttttggaaatagatccttcaataacttatagttgggtgggaaaaaatcgattttatcactagactctttcttttttactatcattacctcatgaactatttcttgaatgagtatatgtattttctttcctatatcggacgcgttcattggaaaatataccatgtcgttaactataagaatatttttatcctcgtttacaaactgaataatatcagatgtagttcgtaaacgaactatatcatcaccagcacaacatctaactatatgatatccactagtttcctttagtcgtttattatcttgttccatattagcagtcattccatcatttaagaaggcgtcaaagataatagggagaaatgacattttggattctgttacaactttaccaaaattaaggatatacggacttactatctttttctcaacgtcaatttgatgaacacacgatgaaaatgtacttcgatgagattgatcatgtagaaaacaacaagggatacaatatttccgcatatcatgaaatatattaagaaatcccaccttattatatttccccaaaggatccatgcacgtaaacattatgccgttatcattaataaagacttctttctcatcggatctgtaaaagttgttactgatttttttcattccaggatctagataattaataatgatgggttttctattcttattctttgtattttggcatatcctagaccagtaaacagtttccactttggtaaaatcagcagacttttgaacgctattaaacatggcattaatggcaataactaaaaatgtaaaatatttttctatgttaggaatatggtttttcactttaatagatatatggtttttggccaaaatgatagatatttttttatccgaggatagtaaaatattattagtcgccgtctctataaaaatgaagctagtctcgatatccaattttattctagaattgataggagtcgccaaatgtaccttatacgttatatctcccttgatgcgttccatttgtgtatctatatcggacacaagatctgtaaatagttttacgttattaatcatcacggtatcgccgtcgctagataatgctaatgtaccatccaagtcccaaatggagagatttaactgttcatcgtttagaataaaatgattaccggtcatattaataaagtgttcatcgtatctagataacaacgacttataattaatgtccaagtcttgaactcgctgaatgatcttttttaacccagttagttttagattggtacgaaatatattgttaaactttgattctacagtaatgtccaaatctagttgtggaaatacttccatcaacattgtttcaaacttgataatattattatctacatcttcgtacgatccaaattccggaatagatgtatcgcacgctctgaccacccagataaccaaaaagtcacacgctccaggatatacattgtataaaaagctatcgttttttagtagtgtttttttctgagtatatacgaagggattaaaaatagtattatcaacgtaactatattccaaattattcttatgagaatagataataatatcgtccttaatatctaacaaatttcctaaatatccctttaattgagtcattcgaagcgtcaatagaatatgtctcttaactatttccggctgttgtatatttaaatgacttcgtaaaaaataatatatgggcgacttctcatctatgtaatcatatggagtgagatatagggctcgttctacctcctgccccttacccacctgtaataccaattgcggacttactatatatcgcatatttatatcgtggggtaaagtgaaaatctactaccgatgatgtaagtcttacaatgttcgaaccagtaccagatcttaatttggaggcctccgtagaactaggggaggtaaatatagatcaaacaacacctatgataaaggagaatagcggttttatatcccgcagtagacgtctattcgcccatagatctaaggatgatgagagaaaactagcactacgattctttttacaaagactttattttttagatcatagagagattcattatttgttcagatgcgttgacgctgtaaaagacgtcactattaccaaaaaaaataacattatcgtggcgccttatatagcacttttaactatcgcatcaaaaggatgcaaacttacagaaacaatgattgaagcattctttccagaactatataatgaacatagtaagaaatttaaattcaactctcaagtatccatcatccaagaaaaactcggataccagtttggaaactatcacgtttatgattttgaaccgtattactctacagtagctctggctattcgagatgaacattcatctggcatttttaatatccgtcaagagagttatctggtaagttcattatctgaaataacatatagattttatctaattaatctaaaatctgatcttgttcaatggagtgctagtacgggcgctgtaattaatcaaatggtaaatactgtattgattacagtgtatgaaaagttacaactggtcatagaaaatgattcacaatttacatgttcattggctgtggaatcagaacttccaataaaattacttaaagatagaaatgaattatttacaaaattcattaacgagttaaaaaagaccagttcattcaagataagcaaacgcgataaggatacgctattaaaatattttacttaggactggagttagaatttatagacgactcatttcgtttatcattattactaccatcattattagtattcttcttgtcatcttgttcagaaatatacagcaatgctatacctaatactaaatacattatcatgctcgcaatggctctaacaacaacgaaccaaaatgaatttggtcgtagcttttgttcacaaaaatacataaagaaatgtctacataaatctatggcgccattggctacttgaaatagcgccagtcctcctacagattttaatatagctgtataacatgacatttattcatcatcaaaagagacagagtcaccatctgtcatatttagattttttttcatgtgttcaaagtatcctctactcatttcattataatagtttatcatacttagaattttaggacggatcaatgagtaagacttgactagatcgtcagtagtaatttgtgcatcgtctattctgcatccgcttcgtcgaataatgtatagcatcgctttgagattctccatagctatcaagtctttatacaatgacatggaaatatctgtgaatactttatacttctccaacatcgatgccttaacatcatcgcctactttagcattgaaaatacgttctattgtgtagatggatgtagcaagatttttaaacaacaatgccattttacacgatgattgcctcaagtctccaatcgtttgtttagaacgattagctacagagttcaacgcttggctgactagcatattattatctttagaaattgtattcttcaatgaggcgtttatcatatctgtgatttcgttagtcatattacagtctgactgggttgtaatgttatccaacatatcacctatggatacggtacacgtaccagcatttgtaataatcctatctaagatgttgtatggcattgcgcagaaaatatcttctcctgtaatatctccactctcgataaatctactcagattattcttaaatgccttattctctggagaaaagatatcagtgtccatcatttcattaatagtatacgcagaaaagataccacgagtatcaattctatccaagatacttatcggttccgagtcacagataatggtttcctctccttcgggagatcctgcatagaaatatctaggacaatagtttctatactgtctgtaactctgataatctctaaagtcactaactgataccatgaaattgagaagatcaaacgctgaagtaattaatttttctgcctcgtttttactacaactagttttcatcaatgtagtgacgatgtattgtttagttactcttggtctaatactgatgatagagatattattacttcccataatggatcttctagtagtcaccttaaagcccattgatgcaaatagcagatagataaagtcttggtatgactcctttctaatatagtacggactacctttgtcacccaactttatacccacataagccataacaacctctttaatagccgtttcatgaggtttatcagccatgagcctgagtagttggaagaatctcatgaatcccgtctcagaaagtcctatatgcatgatagatttatctttcctgggaaactctcgtatagtcatagatgaaatactcttcaaagtttctgaaataagattagtaacagtcttacctccgactactctaggtaacaaacaaactctaataggtgttttctctgcggagataatatcagaaaggatagagcaataagtagtattattgtgattataaagaccgaatacataacaggtagaatttataaacatcatgtcctgaaggtttttagacttgtattcctcgtaatccataccgtcccaaaacatggatttggtaactttgatagccgtagatctttgttccttcgccaacaggttaaagaaattaataaagaatttgttgtttctatttatgtccacaaattgcacgtttggaagcgccacggttacattcactgcagcattttgaggatcgcgagtatgaagtacgatgttattgtttactggtatatctggaaagaaatctaccagtctaggaataagagattgatatcgcatagaaatacaaaagttcataatctcatcatcgaagagcattttgttaccattgtaataaatatccactctgtcatatgtataaatgaagtactgttcaaacatgatgagatgtttatatgttggcatagtagtgagatcgacgtttggtaatggcaatgtattaagattaactccataatgtctagcagcatctgcgatgttataagtgttgtcaaagcggggtcgatcttgtgctgttatatattgtctaacacctataagattatcaaaatcttgtctgcttaatacaccgttaacaatttttgccttgaattcttttattggtgcattaataacatccttatagaggatgttaaacaaataagtattatcaaagttaagatctgggtatttcttttctgctagaacatccattgagtcggagccatctggtttaatataaccaccgataaatctagctctgtattctgtatccgtcaatctaatattaagaaggtgttgagtgaaaggtggaagatcgtaaaagctgtgagtattaatgataggattagtttccgaactaatgttaattggggtattaataatatctatatttccagcgttaagtgtaacattaaacagttttaattcacgtgacgtggtatcaattaaataattaatgcccaatttggatatagcagcctgaagctcatcttgtttagttacggatcctaatgagttattaagcaatatatcgaacggatgaacgaaggttgttttgagtttgtcgcatactttgtaatctagacatagatgcggaagaacggtagaaactatacgaaataaatattcagagtcctctaattgatcaagagtaactattgacttaataggcatcatttatttagtattaaatgacgaccgtaccagtgacggatatacaaaacgatttaattacagagttttcagaagataattatccatctaacaaaaattatgaaataactcttcgtcaaatgtctattctaactcacgttaacaacgtggtagatagagaacataatgccgccgtagtgtcatctccagaggaaatatcctcacaacttaatgaagatctatttccagatgatgattctccggccactattatcgaaagagtacaacctcatactactattattgacgatactccacctcctacgtttcgtagagagttattgatatcggaacaacgtcaacaacgagaaaaaagatttaatattacagtatcgaaaaatgctgaagcaataatggaatctagatctatgatatcttctatgccaacacaaacaccatccttgggagtagtttatgataaagataaaagaattcagatgttggaggatgaagtggttaatcttagaaatcaacgatctaatacaaaatcatctgataatttagataattttaccagaatactatttggtaagactccgtataaatcaacagaagttaataagcgtatagccatcgttaattatgcaaatttgaacgggtctcccttatcagtcgaggacttggatgtttgttcagaggatgaaatagatagaatctataaaacgattaaacaatatcacgaaagtagaaaacgaaaaattatcgtcactaacgtgattattattgtcataaacattatcgagcaagcattgctaaaactcggatttgaagaaatcaaaggactgagtaccgatatcacttcagaaattatcgatgtggagatcggagatgactgcgatgctgtagcatctaaactaggaatcggtaacagtccggttcttaatattgtattgtttatactcaagatattcgttaaacgaattaaaattatttaatttaatacattcccatatccagacaacaatcgtctggattaatctgttcctgtcgtctcataccggacgacatattaatctttttattagtaggcatctttttagatggtttctttttcccagcattaactgagtcgatacctagaagatcgtgattgatctctccgaccattccacgaacttctaattggccgtctctgacggtaccataaactattttaccagcattagtaacagcttggacaatctgaccatccatcgcattgtacgatgtagtagtaactgttgttctacgtctaggagcaccagaagtatttttggagcccttggaggttgatgtagaagaagacgaggattttgattttggtttacatgtaatacattttgaactctttgattttgtatcacatgcgccggcagtcacatctgtttgagaattaagattattgttgcctcctttgacggctgcatctccaccgatttgcgctagtagatttttaagctgtggtgtaatcttattaactgtttcgatataatcatcgtaactgcttctaacggctaaattttttttatccgccatttagaagctaaaaatatttttatttatacagaagatttaactagattatacaatgaactaatatgatccttttccagattatttacaaacttggtattttttggttctggaggaggcgaatttaaattcggacttggattcggattttgtgagttcttgatcttattatacatcgagtataggatggcgacggtaactgctacgcaaataccgatcaacaaaagaataccaatcatttattgacaataacttcactattgatcaagtatgcaatatatcatcttttcactaaataagtagtaataatgattcaacaatgtcgagatatatggacgataataatttagttcatggaaatatcgctatgattggtatgaatgactccgctaactctgtggggtgcgcagtgctttccccacatagaataaattagcattccgactgtgataataataccaagtataaacgccataatactcaatactttccatgtacgagtgggactggtagacttactaaagtcaataaaggcgaagatacacgaaagaatcaaaagaatgattccagcgattagcacgccggaaaaataatttccaatcataagcatcatgtccatttaactaataaaaattttaaatcgccgaatgaacaaagtggaatataaaccatataaaaacaatagtttgtactgcaaaaataatatctatttttgttttcgaagatatggtaaaattaaatagtagtacacagcatgttataactaacagcagcaacggctcgtaattacttatcatttactagacgaaaaggtggtgggatattttcttgctcaaataatacgaatatatcacccatccattttatgcgatgtttatatactctaatctttaatagatctatagacgacgggtttaccaacaatatagattttatcgattcatctaatttaaacccttccttaaacgtgaatgatctattatctggcataacgatgactctacctgatgaatcggacaatgtactgggccatgtagaataaattatcaacgaattatcgtctacgaacatttatatcatttgttttaattttaggacgcgaataaatagatataaaatagaaaataacagatattacaaccaatgttatggccgcgcccaaccaggtaggcagttttattttatcttttactacaggttctcctggatgatgtacgtcaccaacggcggacgtagttctagtacaattagacgtaagttctgcttgggaattttttaacgctaaagagttaacgttaatcgtgcacccaacgtatttacatctagttctttgaacatcttgattataatataaccattttctatctctagattcgtcggtgcactcatgtaaccaacataccctaggtcctaaatatttatctccggaattagattttggataattcgcgcaccaacaatttctatttcctttatgatcgttacaaaagacgtataatgccgtatccccaaaagtaaaataatcaggacgaataattctaataaactcagaacaatatctcgcatccatatgtttggagcaaatatcggaataagtagacatagccggtttccgttttgcacgtaaccattctaaacaattggggtttccaggatcgtttctacaaaatccagtcatgaaatcgtcacaatgttctgtcttgtaattattattaaatatttttggacagtgtttggtatttgtcttagaacaacattttgctacgctatcactatcgcccaggagataatccttttttataaaatgacatcgttgcccggatgctatataatcagtagcgtgttttaaatccttaatatattcaggagttacctcgttctgataatagattaatgatccaggacgaaatttgaaagaactacatggttctccatgaattaatacatattgtttagcaaattcaggaactataaaactactacaatgatctatcgacataccatctatcaaacaaaatttgggtttaatttctcccggagatgtttcataatagtacgtataactttcttctgcaaacttaacagctctattatattcaggataattaaaacctaattccatatatttgtctcgtatatctgctattcctggtgctattttgattctattaagagtaacagctgcccccattcttaataatcgtcagtatttaaactgttaaatgttggtatatcaacatctaccttatttcccgcagtataaggtttgttgcaggtatactgttcaggaatggttacatttatacttcttctatagtcctgtctttcgatgttcatcacatatgcaaagaacagaataaacaaaataatgtaagaaataatattaaatatctgtgaattcgtaaatacattgattgccataataattacagcagctacaatacacacaatagacattcccacagtgttgccattacctccacgatacatttgagttactaagcaataggtaataactaagctagtaagaggcaatagaaaagatgagataaatatcatcaatatagagattagaggagggctatatagagccaagacgaacaaaatcaaaccgagtaacgttctaacatcattatttttgaagattcccaaataatcattcattcctccataatcgttttgcatcatacctccatctttaggcataaacgattgctgctgttcctctgtaaataaatctttatcaagcactccagcacccgcagagaagtcgtcaagcatattgtaatatcttaaataactcatttatatattaaaaaatgtcactattaaagatggagtataatctttatgccgaactaaaaaaaatgacttgtggtcaacccctaagtctttttaacgaagacggggatttcgtagaagttgaaccgggatcatcctttaagtttctgatacctaagggattttacgcctctccttccgtaaagacgagtctagtattcgagacattaacaacgaccgataataaaatcactagtatcaatccaacaaatgcgccaaagttatatcctcttcaacgcaaagtcgtatctgaagtagtttctaatatgaggaaaatgatcgaatcaaaacgtcctctatacattactcttcacttggcgtgtggatttggtaagactattaccacgtgttatcttatggctacacacggtagaaaaaccgtcatttgcgtacccaataaaatgttaatacatcaatggaagacacaggtagaggcagtcggattggaacataagatatccatagatggagtaagtagtctattaaaggaactaaagactcaaagtccggatgtattaatagtagtcagtagacatctgacaaacgatgccttttgtaaatatatcaataagcattatgatttgttcatcttggatgaatcacatacgtataatctgatgaacaatacagcagttacaagatttttagcgtattatcctccgatgatgtgttattttttaactgctacacctagaccagctaaccgaatttattgtaacagtattattaatattgccaagttatccgatctaaaaaaaactatctatgcggtagatagtttttttgagccatattccacagataatattagacatatgataaaacgattagatggaccatctaataaatatcatatatatactgagaagttattatctgtagacgagcctagaaatcaacttattcttgataccctggtagaagaattcaagtcaggaactattaatcgaattttagttattactaaactacgtgaacatatggtattcttctacaaacgattattagatcttttcggaccagaggttgtatttataggagacgcccaaaatagacgtactccagatatggtcaaatcaatcaaggaactaaatagatttatattcgtatccaccttattttattccggtactggtttagatattcctagtttggattcgttgttcatttgctcggcagtaatcaacaatatgcaaatagagcaattactagggagggtatgtcgagaaacagaactattagataggacggtatatgtatttcctagcacatccatcaaagaaataaagtacatgataggaaatttcatgcaacgaattattagtctgtctgtagataaactaggatttaaacaaaaaagttatcggaaacatcaagaatccgatcccacttctgtatgtacaacatcctccagagaagaacgtgtattaaatagaatatttaactcgcaaaatcgttaagaagtttaagcgacgatccgcatgctgcgcaggccagtgtattacccctcatagtattaatataatccaatgatacttttgtgatgtcggaaatcttaaccaatttagactgacaggcagaacacgtcatgcaatcatcatcgtcatcgataactgtagtcttgggcttctttttgcggctcttcattccggaacgcacattggtgctatccatttaggtagtaaaaaataagtcagaatatgccctatagcacgatcgtgcaaaacctggtatatcgtctctatctttatcacaatatagtgtatcgacatctttattattattgacttcgtttatcttggaacatggaatgggaacatttttgttatcaacggccacctttgccttaattccagatgttgtaaaattataactaaacagtctatcatcgacacaaatgaaattcttgtttagacgtttgtagtttacgtatgcggctcgttcgcgtctcattttttcagatattgcaggtactataatattaaaaataagaatgaaataacataggattaaaaataaagttatcatgacttctagcgctgatttaactaacttaaaagaattacttagtctgtacaaaagtttgagattttcagattctgcggctatagaaaagtataattctttggtagaatggggaacatctacttactggaaaataggcgtgcaaaaggtagctaatgtcgagacgtcaatatctgattattatgatgaggtaaaaaataaaccgtttaatattgatccgggctattacattttcttaccggtatattttgggagcgtctttatttattcgaagggtaaaaatatggtagaacttggatctggaaactcttttcaaataccagatgatatgcgaagtgcgtgtaacaaagtattagacagcgataacggaatagactttctgagatttgttttgttaaacaatagatggataatggaagatgctatatcaaaatatcagtctccagttaatatatttaaactagctagtgagtacggattaaacatacccaaatatttagaaattgaaatagaggaagacacattatttgacgacgagttatactctattatagaacgctcttttgatgataaatttccaaaaatatccatatcgtatattaagttgggagaacttagacggcaagttgtagactttttcaaattctcgttcatgtatattgagtccatcaaggtagatcgtataggagataatatttttattcctagcgttataacaaaatcaggaaaaaagatattagtaaaagatgtagaccatttaatacgatccaaggttagagaacatacatttgtaaaagtaaaaaagaaaaacacattttccattttatacgactatgatggaaacggaacagaaactagaggagaagtaataaaacgaattatagacactataggacgagactattatgttaacggaaagtatttctctaaggttggtagtgcaggcttaaagcaattgactaataaattagatattaatgagtgcgcaactgtcgatgagttagttgatgagattaataaatccggaactgtaaaacgaaaaataaaaaaccaatcagcatttgatttaagcagagaatgtttgggatatccagaagcggattttataacgttagttaataacatgcggttcaaaatagaaaattgtaaggttgtaaatttcaatattgaaaatactaattgtttaaataacccgagtattgaaactatatatagaaactttaaccagttcgtctcaatctttaatgtcgtcaccgatgtcaaaaaaagattattcgagtgaaataatatgcgcctttgatataggtgcaaaaaatcctgccagaactgttttagaagtcaaggataactccgttagggtattggatatatcaaaattagactggagttctgattgggaaaggcgcatagctaaagatttgtcacaatatgaatacactacagttcttctagaacgtcagcctagaaggtcgccgtatgttaaatttatctattttattaaaggctttttatatcatacatcggctgccaaagttatttgcgtctcgcctgtcatgtctggtaattcatatagagatcgaaaaaagagatcggtcgaagcatttcttgattggatggacacattcggattgcgagactccgttccggatagacgcaaattagacgatgtagcggatagtttcaatttggctatgagatacgtattagataaatggaatactaattatacaccttataataggtgtaaatctaggaattacataaaaaaaatgtaataacgttagtaacgccattatggataatctatttacctttctacatgaaatagaagatagatatgccagaactatttttaactttcatctaataagttgcgatgaaataggagatatatatggtcttatgaaagaacgaatttcctcagaggatatgtttgataatatagtgtataataaagatatacatcatgccattaagaaactagtgtattgcgacatccaacttactaaacacattattaatcagaatacgtatccggtatttaacgattcttcacaagtgaaatgttgtcattatttcgatataaactcagataatagcaatattagctctcgtacagtagagatatttgagagggaaaagtcatctcttgtatcatatattaaaactaccaataagaagagaaaggtcaattacggcgaaataaagaaaactgttcatggaggcactaatgcaaattacttttccggtaaaaagtctgatgagtatctgagtactacagttagatccaacattaatcaaccttggatcaaaaccatttctaagagaatgagagtagatatcattaatcactctatagtaacgcgtggaaaaagctctatattacaaactatagaaattatttttactaatagaacatgtgtgaaaatattcaaggattctactatgcacattattctatccaaggacaaggatgaaaaggggtgtatacacatgattgacaaattattctatgtctattataatttatttctgttgttcgaagatatcatccaaaacgagtactttaaagaagtagctaatgttgtaaaccacgtacttacggctacggcattagatgagaaattattcctaattaagaaaatggctgaacacgatgtttatggagttagcaatttcaaaatagggatgtttaacctgacatttattaagtcgttggatcataccgttttcccctctctgttagatgaggatagcaaaataaagttttttaaggggaaaaagctcaatattgtagcattacgatctctggaggattgtataaattacgtgactaaatccgagaatatgatagaaatgatgaaggaaagatcgactattttaaatagcatagatatagaaacggaatcggtagatcgtctaaaagaattgcttctaaaatgaaaaaaaacactgattcagaaatggatcaacgactcggatataagtttttggtgcctgatcctaaagccggagttttttatagaccgttacatttccaatatgtatcgtattctaattttatattgcatcgattgcatgaaatcttgaccgtcaagcggccactcttatcgtttaagaataatacagaacgaattatgatagaaattagcaatgttaaagtgactcctccagattactcacctataatcgcgagtattaaaggtaagagttatgacgcattagccacgttcactgtaaatatctttaaagaggtaatgaccaaagagggtatatccatcactaaaataagtagttatgagggaaaagattctcatttgataaaaattccgctactaataggatacgggaataaaaatccacttgatacagccaagtatcttgttcctaatgtcataggtggagtctttatcaataaacaatctgtcgaaaaagtaggaattaatctagtagaaaagattacaacatggccaaaatttagggttgttaagccaaactcattcactttctcgttttcctccgtatcccctcctaatgtattaccgacaagatatcgccattacaagatatctctggatatatcacaattggaagcgttgaatatatcatcgacaaagacatttataacggtcaatattgttttgctgtctcaatatttatctagagtgagtctagaattcattagacgtagcttatcatacgatatgcctccagaagttgtctatctagtaaacgcgataatagatagtgctaaacgaattactgaatctattactgactttaatattgatacatacattaatgacctggtggaagctgaacacattaaacaaaaatctcagttaacgatcaacgagttcaaatatgaaatgctgcataactttttacctcatatgaactatacacccgatcaactaaagggattttatatgatatctttactaagaaagtttctctactgtatctaccacacttctagatatccagatagagattcgatggtttgtcatcgtatactaacatacggcaaatattttgagacgttggcacatgatgaattagagaattacataggcaacatccgaaacgatatcatgaacaatcacaagaacagaggcacttacgcggtaaacattcatgtactaacaactcctggacttaatcatgcattttctagcttattgagtggaaagttcaaaaagtcagacggtagttatcgaacacatcctcactattcatggatgcagaatatttctattcctaggagtgttggattttatccggatcaagtaaagatttcaaagatgttttctgtcagaaaataccatccaagtcaatatctttacttttgttcatcagacgttccggaaagaggtcctcaggtaggtttagtatctcaattgtctgtcttgagttccattacaaatatactaacgtctgagtatttggatttggaaaagaaaatttgtgagtatatcagatcatattataaagatgatataagttactttgaaacaggatttccaatcactatagaaaatgctctagtcgcatctcttaatccaaatatgatatgtgattttgtaactgactttagacgtagaaaacggatgggattcttcggtaacttggaggtaggtattactttagttagggatcacatgaatgaaattcgcattaatattggagcgggaagattagtcagaccattcttggttgtggataacggagagctcatgatggatgtgtgtccggagttagaaagcagattagacgatatgacattctctgacattcagaaagagtttccacatgtcatcgaaatggtagatatagaacaatttacttttagtaacgtatgtgaatcggttcaaaaatttagaatgatgtcaaaggatgaaagaaagcaatacgatttatgtgactttcctgccgaatttagagatggatatgtggcatcttcattagtgggaatcaatcacaattctggacccagagctattcttggatgtgctcaagctaaacaagctatctcttgtctgagttcggatatacgaaataaaatagacaatggaattcatttgatgtatccagagaggccaatcgtgattagtaaggctttagaaacttcaaagattgcggctaattgcttcggccaacatgttactatagcattaatgtcgtacaaaggtatcaatcaagaggatggaattatcatcaaaaaacaatttattcagagaggcggtctcgatatagttaccgcaaagaaacatcaagtagaaattccgttggaaaactttaataacaaagaaagagataggtctaatgcatattcgaaattagaaagtaatggattagttagactgaatgctttcttggaatccggagacgctatggcacgaaatatctcatcaagaactcttgaagatgattttgctagagataatcagattagcttcgatgtttccgagaaatataccgatatgtacaaatctcgcgttgaacgagtacaagtagaacttactgacaaagttaaggtacgagtattaaccatgaaagaaagaagacccattctaggagacaaatttaccactagaacgagtcaaaagggaacagtcgcgtatgtcgcggatgaaacggaacttccatacgatgaaaatggtatcacaccagatgtcattattaattctacatccatcttctctagaaaaactatatctatgttgatagaggttattttaacagccgcatattctgctaagccgtacaacaataagggagaaaaccgacctgtctgttttcctagtagtaacgaaacatccatcgatacatatatgcaattcgctaaacaatgttatgagcattcaaatccgaaattgtctgatgaagaattatcggataaaatcttttgtgaaaagattctctatgatcctgaaacggataagccttatgcatccaaagtattttttggaccaatttattacttgcgtctgaggcatttaactcaggacaaggcaaccgttagatgtagaggtaaaaagacgaagctcattagacaagcgaatgagggacgaaaacgtggaggaggtattaagtttggagaaatggagagagactgtttaatagcgcatggcgcagccaatactattacagaagttttgaaagattcggaagaagattatcaagatgtgtatgtttgtgaaaattgtggagacatagcagcacaaatcaagggtattaatacatgtcttagatgttcaaaacttaatctctctcctctcttaacaaaaattgataccacgcacgtatctaaagtatttcttactcaaatgaacgccagaggcgtaaaagtcaaattagatttcgaacgaaggcctccttcgttttataaaccattagataaagttgatctcaagccgtcttttctggtgtaatattctagtttggtagtagatacatatcaatatcatcaaattcgagatccgaattataaaatgggcgtggattgttaactatagaatcggacgtctgatattcgaaaatctgtggagtttcaggttttggtggaggtgtaactgctacttgggatactgaagtctgatattcagaaagctgggggatgttctggttcgacatccaccgatggtgtcacatcactaatcggttcggtaacgtctgtggatggaggtgctacttctacagaacctgtagcctcagttgtcaacggagatacatttttaatgcgaggaaatgtataatttggtaatggtttctcatgtggatctgaagaagaggtaagatatctactagaaagataccgatcacgttctagttctcttttgtagaacttaactttttctttctcagcatctagttgatattccaacctcttcacgttactacgttcagatttcaattcacgttcgcatgggttacctccgcagtttttacgagcgatttcacgttcagccttcatgcgtctctgtgatccgtttacgttaaaccataaatacatgggtgatcctataaacatgaatttatttctaattctcagagctatagttaattgaccgtgtaatatttgcttacatgcatacttgatacgctcattaataagatttttatcattgctcgttatctcagaatcgtatatataaggagtaccatcgtgattcttaccagatattatacaaaatactatatataaaatatattgaccaacgttagtaatcatataaatgtttaacgttttaaattttgtattcaatgatccattatcatacgctagcatggtcttatgatattcattctttaaaatataatattgtgttagccattgcattggagctcctaatggagattttctattctcgtccattttaggatatgctttcataaagtccctaataacttcgtgaataatgtttctatgttttctactgatgcatgtatttgcttcgatttttttatcccatgtttcatctatcatagatttaaacgcagtaatgctcgcaacattaacatcttgaaccgttggtacaattccgttccataaatttataatgttcgccatttatataactcattttttgaatatacttttaattaacaaaagagttaagttactcatatggacgccgtccagtctgaacatcaatctttttagccagagatatcatagccgctcttagagtttcagcgtgattttccaacctaaatagaacttcatcgttgcgtttacaacacttttctatttgttcaaactttgttgttacattagtaatctttttttccaaattagttagccgttgtttgagagtttcctcattgtcgtcttcatcggctttaacaattgcttcgcgtttagcctctggctttttatcagcctttgtagaaaaaaattcagttgctggaattgcaagatcgtcatctccggggaaaagagttccgtccatttaaagtacagattttagaaactgacactctgcgttatttatatttggtacaacacatggattataaatattgatgttaataacatcagaaaatgtaaagtctatacattgttgcatcgtgttaaattttctaatggatctagtattattgggtccaacttctgcctgaaatccaaatatggaagcggatacaaaaccgtttcctggataaaccacacatctccacttttgctttacatcagaaattgtgtcgttgacatcttgaactctcctatctaatgccggtgttccacctatagattttgaatattcgaatgctgcatgagtagcattaaattccttaatattgccataattttcatatattgagtaaccctggataaaaagtaaacacaccgcagccgtcgctaccacaataaaaaaaattgatagagagttcatttataatctattagaagctgacaaaatttttttacacgcatcagacaatgctttaataaatagttcaacatctacttttgtcatatcgaaccgatggtatgattctaacctagaattacatccgaaaaagttgactatgttcatagtcattaagtcattaacaaacaacattccagactctggattataagacgatactgtttcgtcacaatcacctaccttaatcatgtgattatgaatattggctattagagcaccttctaagaaatctataatatctttgaaacacgatttaaaatcaaaccacgaatatacttctacgaagaaagttagtttacccataggagagataactataaatggagatctaaatacaaaatccggatctatgatagttttaacattattatattctctattaaatacctccacatctaaaaatgttaattttgaaactatgtcttcgtttattaccgtacctgaactaaacgctataagctctattgtttgagaactctttaaacgatattcttgaaatacatgtaacaaagtttcctttaactcggtcggtttatctaccatagttacagaatttgtatccttatctataatataataatcaaaatcgtataaagttatataattatcgcgttcagattgggatcttttcaaatagactaaaaaccccatttctctagtaagtatcttatgtatatgtttgtaaaatatcttcatggtgggaatatgctctaccgcagttagccattcctcattgacagcggtagatgtattagacaaaactattccaatgtttaacaagggccattttacgagattattaaatccttgtttgataaatgtagccaatgagggttcgagttcaacgacgattgaattctcttcccgcggatgctgcatgatgaacgacgggatgttgttcgattgatttggaattctttttcgactttttgtttatattaaatattttaaaatttatagctgatagcaattcatgtaccacggataatgtagacgcgtattgcgcatcgatatctttattattagataaatttatcaataaatgtgagaagtttgcctcgttaaggtcttccatttaaatattatataaacatttgtgtttgtatcttattcgtcttttatggaatagttttttactagtaaagctgcaattacacactttgtccgtaaaacataaatataaacaccagcttttatcaatcgttccaaaaagtcgacggcggacatttttaacatggcatctattttaaatacacttaggtttttggaaaaaacatcattttataattgtaacgattcaataactaaagaaaagattaagattaaacataagggaatgtcatttgtattttataagccaaagcattctaccgttgttaaatacttgtctggaggaggtatatatcatgatgatttggttgtattggggaaggtaacaattaatgatctaaagatgatgctattttacatggatttatcatatcatggagtgacaagtagtggagtaatttacaaattgggatcgtctatcgatagactttctctaaataggactattgttacaaaagttaataattatgatgatacattttttgacgacgatgattgatcgctattgcacaattttgtttttttactttctaatatagcgtttagattctttttcatgtgcgaatattgatttactaaaatatcgatgtttaacttttgttctatgacgtccttatcggcggtatcggtacatatacgtaattcaccttcacaaaatacggagtcttcgataataatagccaatcgattattggatctagctgtctgtatcatattcaacatgtttaatatatcctttcgtttcccctttacaggcatcgatcgtagcatattttccgcgtctgagatggaaatgttaaaactacaaaaatgcgtaatgttagcccgtcctaatattggtacgtgtctataagtttggcatagtagaataatagacgtgtttaaatgccttccaaagtttaagaattctattagagtattgcattttgatagtttatcgcctacatcatcaaaaataagtaaaaagtgtgctgattttttatgattttgtgcgacagcaatacatttttctatgttacttttagttcgtatcagattatattctagagattcctgactactaacgaaattaatatgatttggccaaatgtatccatcataatctgggttataaacgggtgtaaacaagaatatatgtttatattttttaactagtgtagaaaacagagatagtaaatagatagtttttccagatccagatcctcccgttaaaaccattctaaacggcatttttaataaattttctcttgaaaattgtttttcttggaaacaattcataattatatttacagttactaaattaatttgataataaatcaaaatatggaaaactaaggtcgttagtagggaggagaacaaagaaggcatatcgtgatataaataacatttattatcatgatgacaccagaaaacgacgaagagcagacatctgtgttctccgctactgtttacggagacaaaattcaaggaaagaataaacgcaaacgcgtgattggtctatgtattagaatatctatggttatttcactactatctatgattaccatgtccgcgtttctcatagtgcgcctaaatcaatgcatgtctgctaacgaggctgctattactgacgccgctgttgccgttgctgctgcatcatctactcatagaaaggttgcgtctagcactacgcaatatgatcacaaagaaagctgtaatggtttatattaccagggttcttgttatatattacattcagactaccagttattctcggatgctaaagcaaattgcactgcggaatcatcaacactacccaataaatccgatgtcttgattacctggctcattgattatgttgaggatacatggggatctgatggtaatccaattacaaaaactacatccgattatcaagattctgatgtatcacaagaagttagaaagtatttttgtgttaaaacaatgaactaatatttatttttgtacattaataaatgaaatcgcttaatagacaaactgtaagtatgtttaagaagttgtcggtgccggccgctataatgatgatactctcaaccattattagtggcataggaacatttctgcattacaaagaagaactgatgcctagtgcttgcgccaatggatggatacaatacgataaacattgttatctagataccaacattaaaatgtccacagataatgcggtttatcagtgtcgtaaattacgagctagattgcctagacctgatactagacatctgagagtattgtttagtattttttataaagattattgggtaagtttaaaaaagaccaataataaatggttagatattaataatgataaagatatagatattagtaaattaacaaattttaaacaactaaacagtacgacggatgctgaagcgtgttatatatacaagtctggaaaactggttaaaacagtatgtaaaagtactcaatctgtactatgtgttaaaaaattctacaagtgacaacaaaaaatgaattaataataagtcgttaacgtacgccgccatggacgccgcgtttgttattactccaatgggtgtgttgactataacagatacattgtatgatgatctcgatatttcaatcatggactttataggaccatacattataggtaacataaaaactgtccaaatagatgtacgggatataaaatattccgacatgcaaaaatgctactttagctataagggtaaaatagttcctcaggattctaatgatttggctagattcaacatttatagcatttgtgccgcatacagatcaaaaaataccatcatcatagcatgcgactatgatatcatgttagatatagaagataaacatcagccattttatctattcccatctattgatgtttttaacgctacaatcatagaagcgtataacctgtatacagctggagattatcatctaatcatcaatccttcagataatctgaaaatgaaattgtcgtttaattcttcattctgcatatcagacggcaatggatggattataattgatgggaaatgcaatagtaattttttatcataaaagttgtaaagtaaataataaaacaataaatattgaactagtagtacgtatattgagcaatcagaaatgatgctggtacctcttatcacggtgacagtagttgcgggaacaatattagtatgttatatattatatatttgtaggaaaaagatacgtactgtctataatgacaataaaattatcatgacaaaattaaaaaagataaagagttctaattccagcaaatctagtaaatcaactgatagcgaatcagactgggaggatcactgtagtgctatggaacaaaacaatgacgtagataatatttctaggaatgagatattggacgatgatagcttcgctggtagtttaatatgggataacgaatccaatgttatggcgcctagcacagaacacatttacgatagtgttgctggaagcacgctgctaataaataatgatcgtaatgaacagactatttatcagaacactacagtagtaattaatgaaacggagactgttgaagtacttaatgaagataccaaacagaatcctaactattcatccaatcctttcgtaaattataataaaaccagtatttgtagcaagtcaaatccgtttattacagaacttaacaataaatttagtgagaataatccgtttagacgagcacatagcgatgattatcttaataagcaagaacaagatcatgaacacgatgatatagaatcatcggtcgtatcattggtgtgattagtttcctttttataaaattgaagtaatatttagtattattgctgccgtcacgttgtacaaatggagatattccctgtattcggcatttctaaaattagcaattttattgctaataatgactgtagatattatatagatacagaacatcaaaaaattatatctgatgagatcaatagacagatggatgaaacggtacttcttaccaacatcttaagcgtagaagttgtaaatgacaatgagatgtaccatcttattccccatagactatcgactattatactctgtattagttctgtcggaggatgtgttatctctatagataatgacgtcaatggcaaaaatattctaacctttcccattgatcatgctgtaatcatatccccactgagtaaatgtgtcgtagttagcaagggtcctacaaccatattggttgttaaagcggatatacctagcaaacgattggtaacatcgtttacaaacgacatactgtatgtaaacaatctatcactgattaattatttgccgttgtctgtattcattattagacgagttaccgactatttggatagacacatatgcgatcagatatttgcgaataataagtggtattccattataaccatcgacaataagcagtttcctattccatcaaactgtataggtatgtcctctgccaagtacataaattctagcatcgagcaagatactttaatacatgtttgtaacctcgagcatccattcgacttagtatacaaaaaaatgcagtcgtacaattctgtacctatcaaggaacaaatattgtacggtagaattgataatataaatatgagcattagtatttctgtgtattaatagatttctagtatggggatcattaatcatctctaatctctaaatacctcataaaacgaaaaaaaagctattatcaaatactgtacggaatggattcattctcttctctttttatgaaactctgttgtatatctactgataaaactggaagcaaaaaatctgatagaaagaataagaataagatcaagatcaaggattatatggaacacgattattataaaataacaatagttcctggttcctcttccacgtctactagctcgtggtattatacacatgcctagtaatagtctctttgcgttgacggaaagcagactagaaataacaggctaaaatgttcagacaccataatagttcccaacccagataataacagagtaccatcaacacattcctttaaactcaatcccaaacccaaaaccgttaaaatgtatccggccaattgatagtagataatgaggtgtacagcgcatgataatttacacagtaaccaaaatgaaaatactttagtaattataagaaatatagatggtaacgtcatcatcaacaatccaataatatgccggagagtaaacattgacggataaaacaaaaatgctccgcataactctatcatggcaataacacaaccaaatacttgtaagattcctaaattagtagaaaatacaacggatatcgatgtataagtgatctcgagaaataataagaataaagtaatgcccgtaaagataaacatcaacattgtttggtaatcattaaaccaattagtatgaagttgaactaatttcacagtagattttattccagtgttatcctcgcatgtataagtacctggtaagatatctttatattctataatcaatgagacatcactatccgataacgaatgaagtctagcactagtatgccatttacttaatattgtcgtcttggaagttttattataagttaaaatatcatggttatccaatttccatctaatatactttgtcggattatctatagtacacggaataatgatggtatcattacatgctgtatactctatggtctttgtagttgttataacaaccaacgtatagaggtatatcaacgatattctaactcttgacattttttatttatttaaaatgatacctttgttatttattttattctattttgctaacggtattgaatggcataagtttgaaacgagtgaagaaataatttctacttacttattagacgacgtattatacacgggtgttaatggggcggtatacacattttcaaataataaactaaacaaaactggtttaactaataataattatatcacaacatctataaaagtagaggatgcggataaggatacattagtatgcggaaccaataacggaaatcccaaatgttggaaaatagacggttcagacgacccaaaacatagaggtagaggatacgctccttatcaaaatagcaaagtaacgataatcagttacaacgaatgtgtactatctgacataaacatatcaaaagaaggaattaaacgatggagaagatttgacggaccatgtggttatgatttatacacggcggataacgtaattccaaaagatggtttacgaggagcattcgtcgataaagatggtacttatgacaaagtttacattcttttcactgatactatcggctcaaagagaattgtcaaaattccgtatatagcacaaatgtgcctaaacgacgaaggtggtccatcatcattgtctagtcatagatggtcgacgtttctcaaagtcgaattagaatgtgatatcgacggaagaagttatagacaaattattcattctagaactataaaaacagataatgatacgatactatatgtattcttcgatagtccttattccaagtccgcattatgtacctattctatgaataccattaaacaatctttttctacgtcaaaattggaaggatatacaaagcaattgccgtctccagctcctggtatatgtttaccagctggaaaagttgtttcacataccacgtttgaagtcatagaaaaatataatgtactagatgatattataaagcctttatctaaccaacctatcttcgaaggaccgtctggtgttaaatggttcgatataaaggagaaggaaaatgaacatcgggaatatagaatatacttcataaaagaaaattctatatattcgttcgatacaaaatctaaacaaactcgtagctcgcaagtcgatgcgcgactattttcagtaatggtaacttcgaaaccgttatttatagcagatatagggataggagtaggaatgccacaaatgaaaaaaatacttaaaatgtaatcttaatcgagtacaccacacgacaatgaacaaacctaagacagattatgctggttatgcttgctgcgtaatatgcggtctaattgtcggaattatttttacagcgacactattaaaagttgtagaacgtaaattagttcatacaccatcaatagataaaacgataaaagatgcatatattagagaagattgtcctactgactggataagctataataataaatgtatccatttatctactgatcgaaaaacctgggaggaaggacgtaatacatgcaaagctctaaatccaaattcggatctaattaagatagagactccaaacgagttaagttttttaagaagccttagacgaggctattgggtaggagaatccgaaatattaaaccagacaaccccatataattttatagctaaaaatgccacgaagaatggaaatatatttgtagcacaacgaatactcccaaactgcattcgtgttacactatataacaattacactacatttttatcataccactacttcggttagatgttttagaaaaaaataaatatcgccgtaccgttcttgtttttataaaaataacaattaacaattatcaaattttttctttaatattttacgtggttgaccattcttggtggtaaaataatctcttagtgttggaatggaatgctgtttaatgtttccgcactcatcgtatattttgacgtatgcagtcacatcgtttacgcaatagtcagactgtagttctatcatgcttcctacatcagaaggaggaacagttttaaagtctcttggttttaatctattgccattagttttcatgaaatcctttgttttatccacttcacattttaaataaatgtccactatacattcttctgttaattttactagatcgtcatgggtcatagaatttataggttccgtagtccatggatccaaactagcaaacttcgcgtatacggtatcgcgattagtgtatacaccaactgtatgaaaattaagaaaacagtttaatagatcaacagaaatatttaatcctccgtttgatacagatgcgccatatttatggatttcggattcacacgttgtttgtctgaggggttcgtctagcgttgcttctacgtaaacttcgattcccatatattctttattgtcagaatcgcataccgatttatcatcatacactgtttgaaaactaaatggtatacacatcaaaataataaataataacgagtacattctgcaatattgttatcgtaattggaaaaatagtgttcgagtgagttggattatgtgagtattggattgtatattttattttatattttatattttatattttgtaataagaataaaatgctaatgtcaagtttattccaatagatgtcttattaaaaaacatatataataaataacaatggctgaatggcataaaattatcgaggatatctcaaaaaataataagttcgaggatgccgccatcgttgattacaagactacaaagaatgttctagctgctattcctaacagaacatttgccaagattaatccgggtgaaattattcctctcatcactaatcgtaatattctaaaacctcttattggtcagaaatattgtattgtatatactaactctctaatggatgagaacacgtatgctatggagttgcttactgggtacgcccctgtatctccgatcgttatagcgagaactcataccgcacttatatttttgatgggtaagccaacaacatccagacgtgacgtgtatagaacgtgtagagatcacgctacccgtgtacgtgcaactggtaattaaaataaaaagtaatattcatatgtagtgtcaattttaaatgatgatgatgaaatggataatatccatattgacgatgtcaataatgccggtattggcatacagctcatcgatttttagatttcattcagaggatgtggaattatgttatgggcatttgtattttgataggatctataatgtagtaaatataaaatataatccgcatattccatatagatataattttattaatcgcacgttaaccgtagatgaactagacgataatgtcttttttacacatggttattttttaaaacacaaatatggttcacttaatcctagtttgattgtctcattatcaggaaacttaaaatataatgatatacaatgctcagtaaatgtatcgtgtctcattaaaaatttggcaacgagtacatctactatattaacatctaaacataagacttattctctacatcggtccacgtgtattactataataggatacgattctattatatggtataaagatataaatgacaagtataatgacatctatgattttactgcaatatgtatgctaatagcgtctacattgatagtgaccatatacgtgtttaaaaaaataaaaatgaactcttaattatgctatgctattagaaatggataaaatcaaaattacggttgattcaaaaattggtaatgttgttaccatatcgtataacttggaaaagataactattgatgttacaccaaaaaagaaaaggatgtattattagcgcaatcagttgctgtcgaagaggcaaaagatgtcaaggtagaagaaaaaaatattatcgatattgaagatgacgatgatatggatgtagaaagcgcgtaatactatctataaacataagtatataataaatactttttatttacggtactcttgtagtggtgataccctactcgattatttttttaaaaaaaaaatacttattctgattcttctaaccatttccgtgttcgtttgaatgccacatcgacgtcaaagataggggagtagttgaaatctagttctgcattgttggtacgcacctcaaatgtagtgttggatatcttcaacgtatagttgttgagtagtgatggttttctaaatagaattctcttcatatcattcttgcacgcgtacatttttagcatccatcttggaatcctagatccttgttctattcccaatggtttcatcaatagaagattaaacatatcgtacgaacacgatggagagtaatcgtagcaaaagtaagcatttcctttaatcttagatcccggatactggatatattttgcagccaacacgtgcatccatgcagcatttcctacatatacccggctatgtaccgcgttatcatcgactgtacgatacataatgttaccgtgttgcttacattgctcgtaaaagactttcgtcaatttgtctccttctccgtaaattccagtgggtcttaggcaacaagtatacaattttgctccattcatgattacggaattattggctttcataaccagttgctcggccatacgtttactttttgcgtatacatgtcctggtgatatatcataaagggtatgctcatggccgatgaatggatcaccgtgtttattgggtcctattgcttccatgctactagtatagatcaaatacttgattcctaggtccacacaagctgccaatatagtctgtgttccataatagtttactttcatgatttcattatcggtgtattttccaaatacatccactagagcagccgtatgaataatcagatttaccccatctagcgcttctctcaccttatcaaagtcgtttatatcacattgtatatagtttataaccttaactttcgaggttattggttgtggatcttctacaatatctatgactctgatttcttgaacatcatctgcactaattaacagttttactatatacctgcctagaaatccggcaccaccagtaaccgcgtacacggccattgctgccactcataatatcagactacttattctattttactaaataatggctgtttgtataatagaccacgataatatcagaggagttatttactttgaaccagtccatggaaaagataaagttttaggatcagttattggattaaaatccggaacgtatagtttgataattcatcgttacggagatattagtcaaggatgtgattccataggcagtccagaaatatttatcggtaacatctttgtaaacagatatggtgtagcatatgtttatttagatacagatgtaaatatatttacaattattggaaaggcgttatctatttcaaaaaatgatcagagattagcgtgtgaagttattggtatttcttacataaatgaaaagataatacattttcttacaattaacgagaatggcgtttgatatatcagttaatgcgtctaaaacaataaatgcattagtttacttttctactcagcaaaataaattagtcatacgtaatgaagttaatgatacacactacactgtcgaatttgatagggacaaagtagttgacacgtttatttcatataatagacataatgacaccatagagataagaggggtgcttccagaggaaactaatattggttgcgcggttaatacgccggttagtatgacttacttgtataataagtatagttttaaactgattttagcagaatatataagacacagaaatactatatccggcaatatttattcggcattgatgacactagatgatttggctattaaacagtatggagacattgatctattatttaatgagaaacttaaagtagactccgattcgggactatttgactttgtcaactttgtaaaggatatgatatgttgtgattctagaatagtagtagctctatctagtctagtatctaaacattgggaattgacaaataaaaagtataggtgtatggcattagccgaacatatatctgatagtattccaatatctgagctatctagactacgatacaatctatgtaagtatctacgcgggcacactgagagcatagaggatgaatttgattattttgaagacgatgattcgtctacatgttctgccgtaaccgacagggaaacggatgtataattttttttatagcgtgaaggatatgataaaaaatataattgttgtatttatcccattccaatcaccttatatgattctgtaaaaaaattatactgtaacacaataaaggagtcttatagatgtatagaggtcagatactggtttgataaactgtttattccacataagtatgtttgactttatggttagacccgcatactttaacaaatcactgaaaattggagttaggtattgacctctcagaatcagttgccgttctggaacattaaatgtattttttatgatatactccaacgcatttatgtgggcatacaacaagtcattactaatggagtattccaagagttttagttgtctagtatttaacaagagaagagatttcaacagactgtttatgaactcgaatgccgcctcattgtcgcttatattgatgatgtcgaattctcccaatatcatcaccgatgagtagctcatcttgttatcgggatccaagttttctaaagatgtcattaaaccctcgatcatgaatggatttatcatcatcgtttttatgttggacatgagcttagtccgtttgtccacatctatagacgacgatttctgaattatttcatatatccctctctttaactccaggaacttgtcaggatggtctactttaatatgttctcgtctaagagatgaaaatctttggatggttgcacgcgacttttctctaaaggatgacgttgcccaagatcctctcttaaatgaatccatcttatccttggacaagatggacagtctattttccttagatggtttaatatttttgttacccatgatctataaaggtagacctaatcgtctcggatgaccatatatttattttcagttttattatacgcataaattgtaaaaaatatgttaggtttacgaaaatgtctcgtggggcattaatcgtttttgaaggattggacaaatctggaaaaacaacacaatgtatgaacatcatggaatctataccggcaaacacgataaaatatcttaactttcctcagagatccactgtcactggaaagatgatagatgactatctaactcgtaaaaaaacctataatgatcatatagttaatctattattttgtgcaaatagatgggagtttgcatcttttatacaagaacaactagaacagggaattactttaatagttgatagatacgcattttctggagtagcgtatgccgccgctaaaggcgcgtcaatgactctcagtaagagttatgaatctggattgcctaaacccgacttagttatattcttggaatctggtagcaaagaaattaatagaaacgtcggcgaggaaatttatgaagatgttacattccaacaaaaggtattacaagaatataaaaaaatgattgaagaaggagatattcattggcaaattatttcttctgaattcgaggaagatgtaaagaaggagttgattaagaatatagttatagaggctatacacacggttactggaccagtggggcaactgtggatgtaatagtgaaattacattttttataaatagatgttagtacagtgttataaatggatgaagcatattactctggcaacttggaatcagtactcggatacgtgtccgatatgcataccgaactcgcatcaatatctcaattagttattgccaagatagaaactatagataatgatatattaaacaaggacattgtaaattttatcatgtgtagatcaaacttggataatccatttatctctttcctagatactgtatatactattatagatcaagagaactatcagactgagttgattaattcattagacgacaatgaaattatcgattgtatagttaataagtttatgagcttttataaggataacctagaaaatatagtagatgctatcatcactctaaaatatataatgaataatccagattttaaaactacgtatgccgaagtactcggttccagaatagccgatatagatattaaacaagtgatacgtaagaatatactacaattgtctaatgatatccgcgaacgatatttgtgaaaaatattaaaaaaaaatactttttttattaaatgacgtcgcttcgcgaatttagaaaattatgctgtgatatatatcacgcatcaggatataaagaaaaatctaaattaattagagactttataacagatagggatgataaatatttgatcattaagctattgcttcccggattagacgatagaatttataacatgaacgataaacaaattataaaattatatagtataatatttaaacaatctcaggaagatatgctacaagatttaggatacggatatataggagacactattaggactttcttcaaagaaaacacagaaatccgtccaagagataaaagcattttaactttagaagacgtggatagtttcttaactacgttatcatccgtaactaaagaatcgcatcaaataaaattattgactgatatcgcatccgtttgtacatgtaatgatttaaaatgtgtagtcatgcttattgataaagatctaaaaattaaagcgggtcctcggtacgtacttaacgctattagtcctaatgcctatgatgtgtttagaaaatctaataacttgaaagagataatagaaaattcatctaaacaaaatctagactctatatctatttctgttatgactccaattaatcccatgttagcggaatcgtgtgattctgtcaataaggcgtttaaaaaatttccatcaggaatgtttgcggaagtcaaatacgatggtgaaagagtacaagttcataaaaataataacgagtttgccttctttagtagaaacatgaaaccagtactctctcataaagtggattatctcaaagaatacataccgaaagcatttaaaaaagctacgtctatcgtattggattctgaaattgttcttgtagacgaacataatgtaccgctcccgtttggaagtttaggtatacacaaaaagaaagaatataaaaactctaacatgtgtttgttcgtgtttgactgtttgtactttgatggattcgatatgacggacattccattgtacgaacgaagatcttttctcaaagatgttatggttgaaatacccaatagaatagtattctcagagttgacgaatattagtaacgagtctcagttaactgacgtattggatgatgcactaacgagaaaattagaaggattggtcttaaaagatattaatggagtatacgaaccgggaaagagaagatggttaaaaataaagcgagactatttgaacgagggttccatggcagattctgccgatttagtagtactaggtgcctactatggtaaaggagcaaagggtggtatcatggcagtctttctaatgggttgttacgacgatgaatccggtaaatggaagacggtaactaaatgttccggtcacgatgataatacgttaagggttttgcaagaccaattaacgatgattaaaattaacaaggatcccaaaaaaattccagagtggttagtagttaataaaatctatattcccgattttgtagtagaggatccgaaacaatctcagatatgggaaatttcaggagcagagtttacatcttccaagtcccataccgcaaatggaatatccattagatttcctagatttactaggataagagaggataaaacgtggaaagaatctactcatctaaacgatttagtaaacttgactaaatcttaatagttacatacaaactgaaaattaaaataacaccatttagttggtggtcgccatggatggtgttattgtatactgtctaaacgcgttagtaaaacatggcgaggaaataaatcatataaaaaatgatttcatgattaaaccatgttgtgaaagagtttgtgaaaaagttaagaacgttcacattggcggacaatctaaaaacaatacagtgattgcagatttgccatatatggataatgctgtatcggatgtatgcaattcactgtataaaaagaatgtatcaagaatatccagatttgctaatttgataaagatagatgacgatgacaagactcctactggtgtatataattattttaaacctaaagatgttattcctgttatcatatctataggaaaggataaagatgtctgtgaactattaatctcatcagacatatcgtgtgcatgcgtggagttaaattcatataaagtagccattcttcccatggatgtttccttttttaccaaaggaaatgcatcattgattattctcctgtttgatttctctatcgatgcagcacctctcttaagaagtgtaaccgataataatgttattatatctagacaccagcgtctacatgacgagcttccgagttccaattggttcaagttttacataagtataaagtccgactattgttctatattatatatggttgttgatggatctgtgatgcatgcgatagctgataatagaactcacgcaattattagcaaaaatatattagacaatactacgattaacgatgagtgtagatgctgttattttgaaccacagattaggattcttgatagagatgagatgctcaatggatcatcgtgtgatatgaacagacattgtattatgatgaatttacctgatgtaggcgaatttggatctagtatgttggggaaatatgaacctgacatgattaagattgctctttcggtggctggtaatttaataagaaatcgagactacattcccgggagacgaggatatagctactacgtttacggtatagcctctagataatttttttaagcacgaaataaaaaacataattttaaaccaatctatttcatactattttgtgtgatcaccatggacataaagatagatattagtatttctggtgataaatttacggtgactactaggagggaaaatgaagaaagaaaaaaatatctacctctccaaaaagaaaaaactactgatgttatcaaacctgattatcttgagtacgatgacttgttagatagagatgagatgtctactattctagaggaatattttatgtacagaggtctattaggcctcagaataaaatatggacgactctttaacgaaattaaaaaattcgacaatgatgcggaagaacaattcggtactatagaagaactcaagcagaaacttagattaaattctgaagagggagcagataactttatagattatataaaggtacaaaaacaggatatcgtcaaacttactgtatacgattgcatatctatgataggattgtgtgcatgcgtggtagatgtttggagaaatgagaaactgttttctagatggaaatattgtttacgagctattaaactgtttattaatgatcacatgcttgataagataaaatctatactgcagaatagactagtatatgtggaaatgtcatagaaagttaaaagttaatgagagcaaaaatatataaggttgtattccatatttgttattttttctgtaatagttaaaaaaatacattcgatggtctatctatcagattattatgtgttataaggtactttttctcataataaactagagtatgagtaagatagtgtttttcaaaacatataaatctaaaattgatggatgagatatacagctattaatttcgaaaatatattttaatctgataactttaaacatggatttttgatggtggtttaacgttttaaaaaaagattttgttattgtagtatatgataatattaaaagatggatataaagaatttgctgactgcatgtactattttttacattactacattggctacggcagatatacctactccgccaccaacgggtcatgtgacaagggagaatatcttgataagaggcataatcaatgttgtaatcggtgtccacctggagaatttgccaaggttagatgtaatggtaacgataacacaaaatgtgaacgctgcccacctcatacatataccacaatcccaattattctaatggatgtcatcaatgtagaaaatgcccaacaggatcatttgataaggtaaagtgtaccggaacacagaacagtaaatgttcgtgtcttcctggttggtattgcgctactgattcttcacagactgaagattgttgaaattgtataccaaaaaggagatgtccatgcggatactttggtggaatagatgaacaaggaaatcctatttgtaaatcgtgttgtgttggtgaatattgcgactacctacgtaattatagacttgatccatttcctccatgcaaactatctaaatgtaattaattatgattttgatgataatgttaccatacattatatcgctacttggttagtgtattattcagtatgaagacctattaataattacttatcttttgacgatcttgttataattataatataaaaatacttatggcatagtaactcataattgctgacgcgataaattcgtaataatctgttttgttcaaaggaatctacaggcataaaaataaaaatataatttataatatactcttacaacgccatcatgaataacagcagtgaattgattgctgttattaatggatttagaaatagtggacgattttgtgatattaatatagttattaatgatgaaaggataaacgctcataaactcatcctatctggagcctccgaatatttttccattctgttttccaataattttatcgattctaatgaatacgaagttaatctaagtcatttagattatcaaagtgttaacgatttgatcgattacatttatgggatacctttgagcctaactaacgataacgtgaaatatattctttcaaccgctgattttttacaaattggatctgccattacggagtgtgaaaattacatacttaaaaatctttgttctaaaaactgtatcgatttctacatatacgctgataaatataataacaagaaaatagaatcagcgtcgtttaacacaatattacaaaatattttgagactcatcaacgatgaaaactttaaatacttaacagaggaatcaatgataaaaattttaagcgatgatatgttaaatataaaaaatgaggatttcgccccactaattctcattaaatggttagagagtactcaacaatcatgcaccgtcgagttacttaaatgcctcagaatatcattgctttccccacaagttataaaatcactttatagtcatcgactggttagttcaatctacgaatgtataacattcttaaacaatatagcattcttggatgaatcatttcctagataccatagcatcgagttgatatctatcggtataagtaattcgcgtgataaaatttccataaactgctacaatcataaaaaaaatacatgggaaatgatatcttcacgtagatataggtgtagtttcgcagtggccgtcctggataatattatttatatgatgggtggatatgatcagtccccgtatagaagttcaaaggttatagcgtacaatacatgtacaaattcttggatatatgatataccagagctaaaatatcctcgttctaattgtgggggactggctgatgacgaatacatttattgtataggcggcatacgcgatcaggattcatcgttgacatctagtattgataaatggaagccatcaaaaccatattggcagaagtatgctaaaatgcgcgaaccaaaatgtgatatgggggttgcgatgttaaacggattaatatatgttataggtggaatcgttaaaggtgacacgtgtaccgacgcactagagagtttatcagaagatggatggatgaagcatcaacgtcttccaataaaaatgtccaatatgtcgacgattgttcatgatggcaagatttatatatctggaggttacaacaatagtagtgtagttaatgtaatatcgaatctagtccttagctataatccgatatatgatgaatggaccaaattatcatcattaaacattcctagaattaatcccgctctatggtcagcgcataataaattatatgtaggaggaggaatatctgatgatgttcgaactaatacatctgaaacatacgataaagaaaaagattgttggacattggataatggtcacgtgttaccacgcaattatataatgtataaatgcgaaccgattaaacataaatatccattggaaaaaacacagtacacgaatgattttctaaagtatttggaaagttttataggtagttgatagaacaaaatacataattttgtaaaaataaatcactttttatactaatatgacacgattaccaatacttttgttactaatatcattagtatacgctacaccttttcctcagacatctaaaaaaataggtgatgatgcaactctatcatgtaatcgaaataatacaaatgactacgttgttatgagtgcttggtataaggagcccaattccattattcttttagctgctaaaagcgacgtcttgtattttgataattataccaaggataaaatatcttacgactctccatacgatgatctagttacaactatcacaattaaatcattgactgctagagatgccggtacttatgtatgtgcattctttatgacatcgcctacaaatgacactgataaagtagattatgaagaatactccacagagttgattgtaaatacagatagtgaatcgactatagacataatactatctggatctacacattcaccagaaactagttctgagaaacctgattatatagataattctaattgctcgtcggtattcgaaatcgcgactccggaaccaattactgataatgtagaagatcatacagacaccgtcacatacactagtgatagcattaatacagtaagtgcaacatctggagaatccacaacagacgagactccggaaccaattactgataaagaagaagatcatacagtcacagacactgtctcatacactacagtaagtacatcatctggaattgtcactactaaatcaaccaccgatgatgcggatctttatgatacgtacaatgataatgatacagtaccatcaactactgtaggtagtagtacaacctctattagtaattataaaaccaaggactttgtagaaatatttggtattaccgcattaattatattgtcggccgtggcaatattctgtattacgtattatatatgtaataaacgttcacgtaaatacaaaacagagaacaaagtctagatttttgacttacataaatgtctgggatagtaaaatctatcatattgagcggaccatctggttcaggaaagacagccatagccaaaagactatgggaatatatttggatttgtggtgtcccataccactagatttcctcgtcctatggaacgagaaggtgtcgattaccattacgttaacagagaggccatctggaagggaatagccgccggaaactttctagaacatactgagtttttaggaaatatttacggaacttctaaaactgctgtgaatacagcggctattaataatcgtatttgtgtgatggatttaaacatcgacggtgttagaagttttaaaaatacttacctaatgccttactcggtgtatataagacctacctctcttaaaatggttgagaccaagcttcgttgtagaaacactgaagctaacgatgagattcatcgtcgcgtgatattggcaaaaacggatatggatgaggccaacgaagcaggtctattcgacactattattattgaagatgatgtgaatttagcatatagtaagttaattcagatactacaggaccgtattagaatgtattttaacactaattaaagacttaagacttaaaacttgataattaataatataactcgtttttatatgtggctatttcaacgtctaatgtattagttaaatattaaaacttaccacgtaaaacttaaaatttaaaatgatatttcattgacagatagatcacacattatgaactttcaaggacttgtgttaactgacaattgcaaaaatcaatgggtcgttggaccattaataggaaaaggtggatttggtagtatttatactactaatgacaataattatgtagtaaaaatagagcccaaagctaacggatcattatttaccgaacaggcattttatactagagtacttaaaccatccgttatcgaagaatggaaaaaatctcacaatataaagcacgtaggtcttatcacgtgcaaggcatttggtctatacaaatccattaatgtggaatatagattcttggtaattaatagattaggtgtagatctagatgcggtgatcagagccaataataatagattaccaaaaaggtcggtgatgttgatcggaatcgaaatcttaaataccatacaatttatgcacgagcaaggatattctcacggagatattaaagcgagtaatatagtcttggatcaaatagataagaataaattatatctagtggattacggattggtttctaaattcatgtctaatggcgaacatgttccatttataagaaatccaaataaaatggataacggtactctagaatttacacctatagattcgcataaaggatacgttgtatctagacgtggagatctagaaacacttggatattgtatgattagatggttgggaggtatcttgccatggactaagatatctgaaacaaagaattgtgcattagtaagtgccacaaaacagaaatatgttaacaatactgcgactttgttaatgaccagtttgcaatatgcacctagagaattgctgcaatatattaccatggtaaactctttgacatattttgaggaacccaattacgacgagtttcggcacatattaatgcagggtgtatattattaagtgtggtgtttggtcgatgtaaaatttttgtcgataaaaattaaaaaataacttaatttattattgatctcgtgtgtacaaccgaaatcatggcgatgttttacgcacacgctctcggtgggtacgacgagaatcttcatgcctttcctggaatatcatcgactgttgccaatgatgtcaggaaatattctgttgtgtcagtttataataacaagtatgacattgtaaaagacaaatatatgtggtgttacagtcaggtgaacaagagatatattggagcactgctgcctatgtttgagtgcaatgaatatctacaaattggagatccgatccatgatcaagaaggaaatcaaatctctatcatcacatatcgccacaaaaactactatgctctaagcggaatcgggtacgagagtctagacttgtgtttggaaggagtagggattcatcatcacgtacttgaaacaggaaacgctgtatatggaaaagttcaacatgattattctactatcaaagagaaggccaaagaaatgagtacacttagtccaggacctataattgattaccacgtctggataggagattgtatctgtcaagttactgctgtggacgtacatggaaaggaaattatgagaatgagattcaaaaagggtgcggtgcttccgatcccaaatctggtaaaagttaaacttggggagaatgatacagaaaatctttcttctactatatcggcggcaccatcgaggtaaccacctctctggaagacagcgtgaataatgtactcatgaaacgtttggaaactatacgccatatgtggtctgttgtatatgatcattttgatattgtgaatggtaaagaatgctgttatgtgcatacgcattcatctaatcaaaatcctataccgagtactgtaaaaacaaatttgtacatgaagactatgggatcatgcattcaaatggattccatggaagctctagagtatcttagcgaactgaaggaatcaggtggatggagtcccagaccagaaatgcaggaatttgaatatccagatggagtggaagacactgaatcaattgagagattggtagaggagttcttcaatagatcagaacttcaggctggtaaattagtcaaatttggtaattctattaattgttaaacatacatctgtttcagctaagcaactaagaacacgtatacggcagcagcttcctttatactctcatcttttaccaacacaaagggtggatatttgttcattggagttgataataatacacacaaagtatttggattcacggtgggttacgactacctcagactggtagagaatgatatagaaaagcatatcaaaagactttgtgttgtgcatttctgtgagaagaaagaggacatcaagtacgcgtgtcgattcatcaaggtatataaacctggggatgaggctacctcgacatacgtgtgcgctatcaaagtggaaagatgctgttgtgctgtgtttgcagattggccagaatcatggtatatggatactaatggtatcaagaagtattctccagatgaatgggtgtcacatataaaattttaattaatgtaactatagagaacaaataataggttgtaatatcatatagacaataactaacaattaattagtaactgttatctcttttttaactaaccaactaactatatacctattaatacatcgtaattatagttcttaacatctattaatcattgattcgcttctttaattttttataaactaacattgttaattgaaaagggataacatgttacagaatataaattatatatggatttttttaaaaaggaaatacttgactggagtgtatatttatctcttcattatatagcacgcgtgtgttccaattcttccacatcccatataatacaggattataatctcattcgaacatacgagaaagtggataaaacaatagttgattttttatctaggttgccaaatttattccatattttagaatatggggaaaatattctacatatttattctatggatgatgctaatacgaatattataattttttttctagatagagtattaaatattaataagaacgggtcatttatacacaatctcaggttatcatcatccattaatataaaagaatatgtatatcaattagttaataatgatcatccagataataggataagactaatgcttgaaaatggacgtagaacaagacattttttgtcctatatatcagatacagttaatatctatatatgtattttaataaatcatggattttatatagatgccgaagacagttacggttgtacattattacatagatgtatatatcactataagaaatcagaatcagaatcatacaatgaattaattaagatattgttaaataatggatcagatgtagataaaaaagatacgtacggaaacacaccttttatcctattatgtaaacacgatatcaacaacgtggaattgtttgagatatgtttagagaatgctaatatagactctgtagactttaatagatatacacctcttcattatgtctcatgtcgtaataaatatgattttgtaaagttattaatttctaaaggagcaaatgttaatgcgcgtaataaattcggaactactccattttattgtggaattatacacggtatctcgcttataaaactatatttggaatcagacacagagttagaaatagataatgaacatatagttcgtcatttaataatttttgatgctgttgaatctttagattatctattatccagaggagttattgatattaactatcgtactatatacaacgaaacatctatttacgacgctgtcagttataatgcgtataatacgttggtctatctattaaacagaaatggtgattttgagacgattactactagtggatgtacatgtatttcggaagcagtcgcaaacaacaacaaaataataatggaagtactattgtctaaacgaccatctttgaaaattatgatacagtctatgatagcaattactaaaaataaacaacataatgcagatttattgaaaatgtgtataaaatatactgcgtgtatgaccgattatgatactcttatagatgtacagtcgctacagcaatataaatggtatattttaaaatgtttcgatgaaatagatatcatgaagagatgttatataaaaaataaaactgtattccaattagttttttgtatcaaagacattaatactttaatgagatacggtaaacatccttctttcgtgaagtgcactagtctcgacgtatacggaagtcgtgtacgtaatatcatagcatctattagatatcgtcagagattaattagtctattatccaagaagctggatgcgggagataaatggtcgtgttttcctaacgaaataaaatataaaatattggaaaactttaacgataacgaactgtccacatatctaaaaatcttataaacactattaaaatataaaatctaagtaggataaaatcacactacatcattgtttccttttagtgctcgacagtgtatactatttttaacactcataaataaaaatgaaaacgatttccgttgttacgttgttatgcgtactacctgctgttgtttattcaacatgtactgtacccactatgaataacgctaaattaacgtctaccgaaacatcgtttaataataaccagaaagttacgtttacatgtgatcagggatatcattcttcggatccaaatgctgtctgcgaaacagataaatggaaatacgaaaatccatgcaaaaaaatgtgcacagtttctgattacatctctgaactatataataaaccgctatacgaagtgaattccaccatgacactaagttgcaacggcgaaacaaaatattttcgttgcgaagaaaaaaatggaaatacttcttggaatgatactgttacgtgtcctaatgcggaatgtcaacctcttcaattagaacacggatcgtgtcaaccagttaaagaaaaatactcatttggggaatatatgactatcaactgtgatgttggatatgaggttattggtgcttcgtacataagttgtacagctaattcttggaatgttattccatcatgtcaacaaaaatgtgatataccgtctctatctaatggattaatttccggatctacattttctatcggtggcgttatacatcttagttgtaaaagtggttttatactaacgggatctccatcatccacatgtatcgacggtaaatggaatcccgtactcccaatatgtgtacgaactaacgaagaatttgatccagtggatgatggtcccgacgatgagacagatttgagcaaactctcgaaagacgttgtacaatatgaacaagaaatagaatcgttagaagcaacttatcatataatcatagtggcgttaacaattatgggcgtcatatttttaatctccgttatagtattagtttgttcctgtgacaaaaataatgaccaatataagttccataaattgctaccgtaaatataaatccgttaaaataattaataattaataattaataattaataacgaacaagtatcaaaagattaaagacttatagctagaatcaattgagatgtcttcttcagtggatgttgatatctacgatgccgttagagcatttttactcaggcactattataacaagagatttattgtgtatggaagaagtaacgccatattacataatatatacaggctatttacaagatgcgccgttataccgttcgatgatatagtacgtactatgccaaatgaatcacgtgttaaacaatgggtgatggatacacttaatggtataatgatgaatgaacgcgatgtttctgtaagcgttggcaccggaatactattcatggaaatgtttttcgattacaataaaaatagtatcaacaatcaactaatgtatgatataattaatagcgtatctataattctagctaatgagagatatagaagcgcttttaacgacgatggtatatacatccgtagaaatatgattaacaagttgtacggatacgcatctctaactactattggcacgatcgctggaggtgtttgttattatctgttgatgcatctagttagtttgtataaataattatttcaatatactagttaaaattttaagattttaaatgtataaaaaactaataacgtttttatttgtaataggtgcattagcatcctattcgaataatgagtacactccgtttaataaactgagtgtaaaactctatatagatggagtagataatatagaaaattcatatactgatgataataatgaattggtgttaaattttaaagagtacacaatttctattattacagagtcatgcgacgtcggatttgattccatagatatagatgttataaacgactataaaattattgatatgtataccattgactcgtctactattcaacgcagaggtcacacgtgtagaatatctaccaaattatcatgccattatgataagtacccttatattcacaaatatgatggtgatgagcgacaatattctattactgcagagggaaaatgctataaaggaataaaatatgaaataagtatgatcaacgatgatactctattgagaaaacatactcttaaaattggatctacttatatatttgatcgtcatggacatagtaatacatattattcaaaatatgatttttaaaaatttaaaatatattatcacttcagtgacagtagtcaaataacaagctggccgcataacttcgtataatgtatgctatacgaagttatgtcgacgatgttcccaatttcaaggacaaaatggccagagttatcaagagaaaatttaataaacagtctcaatcttatttaactaaatttctcggtagcacatcaaatgatgttaccacttttcttagcatgcttaacttgactaaatattcataactaatttttattaatgatacaaaaacgaaataaaactgcatattatacactggttaacgcccttataggctctaaccattttcaagatgaggtccctgattatagtccttctgttcccctctatcatctactccatgtctattagacgatgtgagaagactgaagaggaaacatggggattgaaaatagggttgtgtataattgccaaagatttctatcccgaaagaactgattgcagtgttcatctcccaactgcaagtgaaggattgataactgaaggcaatggattcagggatatacgaaacaccgataaattataaaaaaagcaatgtgtccgctgtttccgttaataatactattttcgtaactggcggattattcataaataactctaatagcacgatcgtggttaacaatatggaaaaacttgacatttataaagacaaacaatggtcgattatagaaatgcctatggctagggtatatcacggcatcgactcgacatttggaatgttatattttgccggaggtctatccgttaccgaacaatatggtaatttagagaaaaacaacgagatatcttgttacaatcctagaacgaataagtggtttgatatttcatatactatttataagatatccatatcatcattgtgtaaactaaataacgtcttctatgtatttagtaaggacattggatatgtggaaaagtatgatggtgcatggaagttagtacatgatcgtctccccgctataaaggcattatcaacttctccttattgattgaaaatgaaaatataaatagtttttatgtatagcagtattaccctatagttttattgcttactactaacatggatacagatacagatacagatacagatacagatacagatacagatacagatacagatgttacaaatgtagaagatatcataaatgaaatagatagagagaaagaagaaatactaaaaaatgtagaaattgaaaataataaaaacattaacaagaatcatccaagtggatatattagagaagcactcgttattaatacaagtagtaatagtgattccattgataaagaagttatagaatgtatcagtcacgatgtaggaatatagatcatatctactaatttttataatcaatacaaaacataaaaaacaactcgttattacatagcaggcatggaatccttcaagtattgttttgataacgatggcaagaaatggattatcggaaatactttatattctggtaattcaatactctataaggtcagaaaaaatttcactagttcgttctacaattacgtaatgaagatagatcacaaatcacacaagccattgttgtctgaaatacgattctatatatctgtattggatcctttgactatcgacaactggacacgggaacgtggtataaagtatttggctattccagatctgtatggaattggagaaaccgatgattatatgttcttcgttataaagaatttgggaagagtattcgccccaaaggatactgaatcagtcttcgaagcatgtgtcactatgataaacacgttagagtttatacactctcgaggatttacccatggaaaaatagaaccgaggaatatactgattagaaataaacgtctttcactaattgactattctagaactaacaaactatacaagagtggaaactcacatatagattacaacgaggacatgataacttcaggaaatatcaattatatgtgtgtagacaatcatcttggagcaacagtttcaagacgaggagatttagaaatgttgggatattgcatgatagaatggttcggtggcaaacttccatggaaaaacgaaagtagtataaaagtaataaaacaaaaaaaagaatataaaaaatttatagctactttctttgaggactgttttcctgaaggaaatgaacctctggaattagttagatatatagaattagtatacacgttagattattctcaaactcctaattatgacagactacgtagactgtttatacaagattgaaattatattctttttttatagagtgtggtagtgttacggatatctaatattaatattagactatctctatcgcgctacacgaccaatatcgattactatgaatatcttctatgaaaggagagaatgtattcatttctccagcgtcaatctcgtcagtattgacaatactgtattatggagctaatggatccactgctgaacagctatcaaaatatgtagaaacggaggagaacacggataaggttagcgctcagaatatctcattcaaatccataaataaagtatatgggcgatattctgccgtgtttaaagatttctttttgggaaaaattggcgataagtttcaaactgttgacttcactgattgtcgcactatagatgcaatcaacaagtgtgtagatatctttactgaggggaaaatcaatccactattggatgaaccattgtctcctagcaattagtgccgtatactttaaagcaaaatggttgacgccattcgaaaaggaatttaccagtgattatcccttttacgtatcaccaacggaaatggtagatgtaagtatgatgtctatgtacggcgagctatttaatcacgcatctgtaaaggaatcattcggcaacttttcaatcatagaactgccatatgttggagatactagtatgatggtcattcttccagacaagattgatggattagaatccatagaacaaaatctaacagatacaaattttaagaaatggtgtaactctctggatgctatgtttatagatgttcacattcccaagtttaaggtaacaggctcgtataatctggtggatactctagtaaaatccgctgatggaaacacagtgaatgctagattgtccagcgtgtccccaggacaaggtaaggactctcccgcgatcactcgtgaagaagctctggctatgatcaaagactgtgaggtgtctatcgacatcagatgtagcgaagaagagaaagacagcgacatcaagacccatccagtactcgggtctaacatctctcataagaaagtgagttacgaagatatcatcggttcaacgatcgtcgatacaaaatgtgtcaagaatctagagtttagcgttcgtatcggagacatgtgcaaggaatcatctgaacttgaggtcaaggatggattcaagtatgtcgacggatcggcatctgaaggtgcaaccgatgatacttcactcatcgattcaacaaaactcaaagcgtgtgtctga

SEQ ID NO: 18 - DNA, 159564 bp, synthetic construct
  misc_feature 1..159564: note = SKV-UL40_K5 recombinant virus
  source 1..159564: mol_type = other DNA
tcagacacacgctttgagttttgttgaatcgatgagtgaagtatcatcggttgcaccttcagatgccgatccgtcgacatacttgaatccatccttgacctcaagttcagatgattccttgcacatgtctccgatacgaacgctaaactctagattcttgacacattttgtatcgacgatcgttgaaccgatgatatcttcgtaactcactttcttatgagagatgttagacccgagtactggatgggtcttgatgtcgctgtctttctcttcttcgctacatctgatgtcgatagacacctcacagtctttgatcatagccagagcttcttcacgagtgatcgcgggagagtccttaccttgtcctggggacacgctggacaatctagcattcactgtgtttccatcagcggattctgagatggatttaatctgaggacatttggtgaatccaaagttcattctcagacctccaccgatgatggagtaataagtggtaggaggatctacatcctcgactgatgtggaatcatcttctgattccacctcgggatctggatctgactcggactctgtaatttccgttacggattggcaaatcttatcattggtcggtgtttggtcttgctttgtgactttgataataacatcgattcccatatgatgtttgttttcttcttccgtacacgaggaggaggatgaggatgattgctgaagactggcaggcacatgcatgccaggacgatatattgtttcataattgctattgattgagtactgttctttatgattctacttccttaccatgcaataaattagaatatattttctacttttacgagaaattaattattgtatttattatttatgggtgaaaaacttactataaaaagcgggtgggtttggaattagtgatcagtttatgtatatcgcaactaccgggcatatggctatcgacatcgagaacattacccacatgataagagattgtatcagtttcgtagtcttgagtattggtattactatatagtatatagatgtcgacgctagatatacagtctccgaatgcggcatgataccgtcatcattctttgctttcgttaactgtttggaggaagaatctttgttattgcatttaatctcgaaattcagagtgcacacctttctcctgtaaagaatcctgaagtcgctaccttattaagaacggagaagtatccatcacgaaatacgggattacagtctttatgattcatagtaatagttagttccgacgttgagatggattcactgagaccggtagtggtcgtccgagtacacgacgtgtcgttgacgggatacagattaatttccacatcgatatagttaaaggtatttctgggtacgggttcgcatttatctgcggaagagacggtgtgagaatatgttccgagaccacacggagaacagatgacgtctccggatactccgtatcctattccacattttgtttgggaaacacatgccttgcatccggatgatcctttgagaagacaataatatccgggagagcattcacagattctattgtgagtagtgttacacgatcgcgtcttccgttacaacttagacaagcgggtaaatgattattgcgagatgtgaaggtacccgaaccacacggcgtacattgtgtgttagtcttgctatcgcataatctggaagcgtatgttcccggacacaaattatggcgtttgtattcgttgtctttacactttccatcggatggtgcatgcggtgctatatctcttccgtttattattatacatgagagaaacaatatatacgagtataatacggacttcataatttaataatgtagtaatcgttgtcgtgttcctgtttcctacttctccaatcatatagatattttctttctatcatggataatatttgtaatggttctttccgtacaacatactgtttagatgatattgcgcataatttccggaggcaaatacgatagtctagattgaccgatggtagactctaatttattgagtgctttgtcgacgagtttacttttacgctccatcgatagatggcactgttctatgagatcgtcgtacatgggaaatgaaatgtgtctgtccgaatgtatggcttcaagatagctgtgataccgtatacaggtcggtgtcggagattcgaatctctttgaggcgacttatgtcacgatgatggaatctatcttatcgaatgatatatttttcataaatacacttttatagtcctcgtttaaacagaatttactatgtagttccgcgaatgactcgtcccttaataggcagtaggctagtatcttttttacgtagtaatcgtcgtagggagagaattctgacatcttgtagaacaacgatttaatcataggtagagatactttcagtctgtggtggatgatgtcattcacaacatccgccttgtatatgatgtttctgttttcaaacaccaagtcgaataccgtctttagtcggaaggttgatgtcgtatccgatgtatgaggcaacattgttgttacaattttgaaaggcggtattatagtattcgtctttctgaatgtcgaacctatctagtagataccgtagtatattgagagtgtatccttgattatgttttatgaatagataaagtagatgttgtccttcttccttttgttcgtgccaattgagtaacattatgagaatatgacctgttgcacaatcgttccatgatgggtgtacaatcaagattattacgtatcctcgagataaaagagcatacaccacacgaggactatgtttggtatactgttgaaggtaagtgtgtaaccgcgttaatgtttgctccataatctattatcgcgtagatgaatcgcttctcggctcgcatcttagtgtgacttaacttgtaataattgcttttgtagaacgtggatatgtgtttacagtagtaatgaagagaagtgagttcatcctcgtcggcgcaattagggtcggatcctttgtacagaacgtagtagtttaagctcccattgaatttatatctaagataacacagcaatagatcggatgatttactaaagtcatcaatggtgtccgttagtatatcaaagatcttgttatcgattgatagtgaatgaatcagatagtggtgtcctttttcatccttgctatcaaagttacgcatgccgtggtgtaacaatatctttaatacagatggattaaatcgtgtattcatcgtatagcaatgtaatggagagttacctcgtttattcagatcgcagtgtttaataactagcttaaacagatgagacgatgtatccacatcaaagaacgtaaaatacatatgacaaacattgttgacagaaacgtgaccttcattcttaccgtcgtccataaatacgttaggtatgtaccacatactgtcgcgaacgatgctcacaatctcgtccatctcgcccatctcatacatttcatcatttactttttcataattagagatgtacgaaagaaaaagaaaaagaaaaagaaaaacagaacaatatatttttttagtaatgtttatgcgagacatataaaataaactccgtgtttatgatgccggtaaatgtttttatcatcttggacggaatcgattttgtaatatgtcatggaaacaaatgaaacaggacattatcactccatgataaattatttaatggagtaataaagtatctccatgggtaatttcgaaatcaagttatcgtctgtattaatgttgtccactatggagtcgatcctctcactgttctttacagtttctgtaatgatggacgttagttcttttttgtaccatttgatgtcggattctttgcgtatctcagtctgtggcgtttgcttcgtttaaataatatatcaaacatggagacgcctgatatgtaggcattcttcattctattaatgtctactctatagcgctttagttccttatgatgaccggcgatatcatacttactttagaaggaaaatcatcatctaggattaaggcgtatctgatacaggcgaataatggttcaggatatagatagcgtatatctctattaaatgcgtcaatcatagtctctagagtgggatggtagctaagtaataaatcaactatcctcgttttgttttctctttggtaactgcttttctggatggccgtattgattatcgagcgtgatgttgtaacactcgctccatattccaataaccgctttgcaaattgtatattattgacatcgaccgcgtaatatagtagagttttattctcattatcgatcatatctatatcatccatgtacttgcttagtatatcaaatacatctattagtatggtttcataacagtgatacccgcaattattaaatctcgataatatcagaccgtacatacatagacggccattgttagatatgtgatttacagccgcgtgtccatattttccacgataaaccttacgacgtttacatcgacgagattattattaacaaagtagtcgtgcagaggatagttgttgtccgttatctaacatgcatcgaacgaccatatcgccgtaatgtaagtagtttatcaacatggcttgtacgatggattcatcctgttgtctaaatctctttagaatgttatcgatgatgtagtggttatattctctggaatcgtacgaagtaatactacgcattacgtcgacaagagtatgacgtctctcaataagaagattaacgatttccatgtctacattatatggggttactctaaatcgcttgtttagataatacgcctctaatatagggctgacgtcgtatactctacacgtgtccacatcctttattaataataatttaacaatctctatatctatggttgagaaagaccagtagtattggatgggtaaagatcctccttcgtctctgccatggatggaaacattgttattgatcaaacatttaattacatccttggatagagattgagattctctatgagacgatatatagtaatgaagagagttcttacacatatcactgttgtacatacaggtacgaaatacgtaaccggtgctgtaacattctgatttaagaagccatagcaatacttctggtctcggattaggcgtcgttacgtatatatccaccaatccgagaccattgattgcataattcgtattcttggacggacgtatccgtttatccacaattaggtattttagcagacgtaagtcgatattatccgaagacagatcgaaatcatttatattcgacttgagttcgttagaggaattcgaatagctggatatcagtagatgcacaatctgagattttacgtatctatgcttactgtatgctcctagcggagttaatccttcgttgtttctacaaagtctctcgactccgcgagagagtaacagtcgaacaatcttaatgtctgtatcgcatttattggagacgtaacaatgtagcgcattgtttcctcgtctatctatatgttttgataagttgtgacacgtttcaatctctagttttatttttttgtacgtcacatcttcatccagtagacgacatagaatagtgcactctctaccacaataatccatagctattctggtgctaattattcctatttcacgaaaaatgatgaaggcaatcattcctcataagatgataaaaagtgtagtgagagagcatgaaggagatttagtatttagcagtgcggatatgatccaagagggtgagatagtcgttctcgttcagaatctttcgcagcataagtagtatgtcgatatacttatcgttgaagactcttccagagacgatagctgattgagtacaaagtccaatgattgcacgaagttcttcggcggttttcatggagtcatttctgatgaaacatttaatgatctccacgcaattgtcgatattgtcccacggaagtgaatccttcaactcaccaccaaagagctccgttgcatcagttctgaaagagatgagaagcctgtagagagaccctgcgctttctctatgggtccatctatgagaaacccacaggatgtattcagtcagacaatgtctgacgtcggccacggtattcagggagtccttagtagcgtggcaatgacagggtctgaactgggcacaaggaaaggccattgtaaaggtagacctgtagccgtttatgctaatagagggctttaatttccatttttttaatgggttgtggatgaggaatgagagtgatatcatattgagatacgtagttatgtagaggtgtatttcctatattatttactttcggtttcatattttaccaactctttaataaatttcttttcacgatgcatcttattgaatgacgttttctcataagtggacatatagatgcagaagtaatgaagaaaagtattacctctatcatctacataattagggtctgctcctttttttaacaacttatacagtacgtagtagtagtttatcggttttaaatcaagtctagaatatatagtggattaatatatttttatattagctaaagctatctatactatcagaaagcatatcattctcaacttcatcatgagttaaatatttgtgtaatggatgtcatgaacattaaacgtattcatgacatactcctttaataggttttttaaaacagatgattcaaatccttcattcattagataacagtgtaacggagtcgtaccttctactagtttgtttatatcacagcattctacaaacagtctaaacaatagagaagacggacagactttaacgtataaatgacacatgttatcgatattcgttgatgaattattattaaacgtagttatgataaatgattctaacgacatctctcgctagagataaaatctagtatcgtatcattaaacatctttgcatcatactcgcatagcatagtttttcataattaatacaatatttaaaagacttattcggaaagtattttaatacatgtatcatcgatggagatccatatgaggagtcacttgtagttcttcagtagtaataacagtgctatcatcgatagtataattatatgtagaaggttcatatgttgttgtaattggagtaactgttggtagttcttccgtggaatcaataattatactaacagcaatagtataattatataaatatgttccgttgatatcacatattttaatgaactcatttctaacaccctcagctatatctgtccaattaaatgtagccaacaatctactacgttctctttgattgactacttgtacggtagcgacgctacactatctttattgtcttctacatgctccaattgaatgtcatgatacaacgcagtttttcttatgcatgtttcataacaccacgaacatgtcgcagtaagatatatagccagagataatttctgtaaattcatgattgccggtcataaacaagcccgtcaataattgtggctatatattcagtttatagagcaaaataattaagcacaatagcgcttaatctcaaaatatgttatgtttatttttttcatattaaacatactggttaaaatcctctaaaggctgatcttcatctataaatcaagatcataattacatttagacagtggtttcatgtttataaaaatgttctttttgtgtgaataaggaatatactaatcaataatcaaccatcgaccccattacgatagtatgcaggcaaccccccattagagaggtacgtgtaatcagtctctccagttttagtatttttataagtcattgttacataaacggcttttaaacagtctcctcgataataagccatatctggaaatttattaaatactcgagtcattttacgcacggtcaaaaaagtaagtaatgtcgacgacttcttacattctatagaaacacctagaatactcattttcttttggaaaatatcctcagactctgatttgaacaatgcacgacctatagtaaaccgtgaccaataagttatattagtcaatggtatatccaaaccatcaggtgtggatagtccagtctttggtatcgatagtgtagttattgaactgagaagttaccgtatagtctttttggtcatctctaaacaaggaaactaatacctctacactattgaacgatttatcttccgtaatgggtggactagcgatggatgaagtcacgaatataagacacgctattaatccgtatatcatcattttgatattacttataataacgatttgtttaatttttagtttatactattaattgtaaatgatattattatttttttaagtattatcagctttagtttatactattactatttgtaatatttagacatagataaacgtgataaaagtctatttgtttatatttattgcggatagcagtatttccctataaaaagtatacgtcctgtggtgtctttaatcatgtacatgaatggatggtttatgtagaccttcgtacgatataccatcgaaaagttaatcgtaaatactcctgtaacggccgatgcttctgtatactcctcattaacatctataaacgtcgtatgtagaaatttttctacagtgatagtttcattacacatcttgctaaaatctgcataatatccgaatatattagtaagtcctaaattttctaaaatcggtaccagattatacggttctgtcatttccactttaaactttggcatatacaagtctatacttttagtagataacataccacaccattttttaaatttttcatctgttatatttttttctatgttatatataccttctatgtcgtccggtagtataatcaccatactagagtttccctcgtatggaatatcgataatagagaatcctccgaataattcattaatatgtacatattgcaagttattctcggtacccaccatcatatcaacactggtaactatattcttagaaatataaaacttgtctgtatatgtaagatgtttagaaaatggatatttccacattgctttaaaatggacggcgctaacaactgtcatacgagtattaatggatagcggactagtcaataaggaattaattttaccatttgtcattgtcttaacccattcgttgattagttcctttgtttggttagcattattaaagtttacagtttgaaaatcgtcttttattttttgtaggaaggaggcgtggaactcgatactatcgctaccgtatattttatttgcggtagctagtgtcgcacaatacggaatatctacgtccatgtcattattgtcatcgggtgtattctcattcatattctctatatattttgatagttgttcagctgtagaaccagctgctccatgatttagaatagataaagtagataaaatagaaactggagaaatcaaaacattttcatcagggtgttttacgattagttctttaaagatatccatggtatagaccaaacaataacgataacgatatatatcataaataaataatgttaaatttcagtttatgtttgtaccccgtattcatacttaacaaattggtattgcgtacacaatcaatcatattacataccattaataatgcaagcataaaaaatcgttagtagatgtttctaaatataggttccgtaagcaaagaatataagaatgaagcggtaatgataaaatcaatcgttatctaaaatgatcatactcatttattttattctattatattaacacatacatttttaacagcaacacattcaatattgtattgttatttttatattatttacacaattaacaatatattattagtttatattactgaattaataatataaaattcccaatcttgttataaacacacactgagaaacagcataaacacagaatccatcaaaaatgtcgatgaaatatctgatgttgttgttcgctgctatgataatcagatcattcgccgatagtggtaacgctatcgaaacgacattgccagaaattacaaacgctacaacagatattccagctatcagattatgcggtccagagggagatggatattgtttacacggtgactgtatccacgctagagatatcgacggtatgtattgtagatgctctcatggttatacaggcattagatgtcagcatgtagtattagtagactatcaacgttcagaaaacccaaacactacaacgtcatatatcccatctcccggtattatgcttgtattagtaggcattattattattattacgtgttgtctattatctgtttataggttcactcgaagaactaataaactacctctacaagatatggttgtgccataatttttataaattttttttatgagtatttttacaaaaatgtataaagtgtatgtcttatgtatatttataaaaatgctaaatatgcgatgtatctatgttatttgtatttatctaaacaatacctctacctctagatattatacaaaaattttttatttcagcatattaaagtaaaatctagttaccttgaaaatgaatacagtgggtggttccgtatcaccagtaagaacataatagtcgaatacagtatccgattgagattttgcatacaatactagtctagaaagaaatttgtaatcatcttctgtgacgggagtccatatatctgtatcatcgtctagtttatcagtgtcccatgctatattcctgttatcatcattagttaatgaaaataactctcgtgcttcagaaaagtcaaatattgtatccatacatacatctccaaaactatcgcttatacgtttatctttaacgatacctatacctagatggttatttactaacagacattttccagatctattgactataactcctatagtttccacatcaaccaagtaatgatcatctattgttatataacaataacataactcttttccgtttttatcagtatgtatatctatattaacgtcgtcgttgtagtgaatagtagttattgatctattatatgaaacggatatgtctagaacggcaattgttttacgtccagttaacactttctttgatttaaagtctagagtctttgcaaacataatatccttatccgactttatatttcctgtagggtggtataattttattttgcctccacatatcggtgtttccaaatatattactagacaatattccatatagttattagttaagggtacccaattagaacacgtacgcttattatcatcatttggatcgtatttcataaaagttattgtactatcgatgtcaacacattctacattttttaatcgtctatatagtatttttctgatattttctataatatcagaattgtcttccatcggaagttgtatactatcagaatcagttacatgtttaaataattctctgatgtcattccttatacaatcaaattcattattaaacagtttaatagtctgtagacctttatcgtcgtaaatatccattgtcttattagttacgcttatttttatgtgtttttacgttgctttattatattttataagaatgattgtttgacgaatcacgagaactattaagacatatattattagaggtatatattataaaaaagtttttgattacgatgttataagaggaaagaggacacattaacatcatacatcaattaactacattcttataacatcgtaatcaaaagaattgcaattttgatgtataacaactgtcaatgggttatggaattgtatattacatattatacggtatgttggtaacgacaaataccgatcggtaattgtctgccggtgtaatagaattatatatatctatctattacaccggctgagtacctacactattatatgattatagtttctatttttacagtaccttaactaaagtctctagtcacaagagcaatactaccaacctacactattatatgattatagtttctatttttataggaacgcgtacgagaaaatcaaatgtctaatttctaacggtagtgttgataaacgattatcgtcaatggatacctcctctatcatgtcgtctattttcttactttgttctattaacttattagcattatatattatttgattataaaacttatattgcttattagcccaatctgtaaatatcggattattaacatatcgtttctttgtaggtttatttaacatgtacatcactgtaagcatgtccgtaccatttattttaatttgacgcatatccgcaatttctttttcgcagtcggttataaattctatatatgatggatacatgctacatgtgtacttataatcgactaatatgaagtacttgatacatattttcagtaacgatttattattaccacctatgaataagtacctgtgatcgtctaggtaatcaactgttttcttaatacattcgatggttggtaatttactcagaataatttccaatatcttaatatataattctgctatttctggaatatatttatctgccagtataacacaaatagtaatacatgtaaacccatattttgttattatattaatgtctgcgccattatctattaaccattctactaggctgacactatgcgacttaatacaatgataaagtatactacatccatgtttatctattttgtttatatcatcaatatacggcttacaaagttttagtatcgataacacatccaactcacgcatagagaaggtagggaataatggcataatatttattaggttatcatcattgtcattatctacaactaagtttccattttttaaaatatactcgacaactttaggatctctattgccaaatttttgaaaatatttatttatatgcttaaatctatataatgtagctccttcatcaatcatacatttaataacattgatgtatactgtatgataagatacatattctaacaatagatcttgtatagaaactgtatatcttttaagaattgtggatattaggatattattacgtaaactattacacaattctaaaatataaaacgtatcacggtcgaataatagttgatcaactatataattatcgattttgtgatttttcttcctaaactgtttacgtaaatagttagatagaatattcattagttcatgaccactatagttactatcgaataacgcgtcaaatatttcccgtttaatatcgcatttgtcaagataataatagagtgtggtatgttcacgataagtataataacgcatctcttttttgtgtgaaattaaatagtttattacgtccaaagatgtagcataaccatcttgtgacctagtaataatataataatagagaactgttttacccattctatcatcataatcagtggtgtagtcgtaatcgtaatcgtctaattcatcatcccaattataatattcaccagcacgtctaatctgttctattttgatcttgtatccatactgtatgttgctacatgtaggtattcctttatccaataatagtttaaacacatctacattgggatttgatgttgtagcgtatttctctacaatattaataccatttttgatactatttatttctatacctttcgaaattagtaatttcaataagtctatatcgatgttatcagaacatagatattcgaatatatcaaaatcattgatatttttatagtcgactgacgacaataacaaaatcacaacatcgtttttgatattattatttttcttggtaacgtatgcctttaatggagtttcaccatcatactcatataatggatttgcaccactttctatcaatgattgtgcactgctggcatcgatgttaaatgttttacaactatcatagagtatcttatcgttaaccatgattggttgttgatgctatcgcattttttggtttctttcatttcagttatgtatggatttagcacgtttgggaagcatgagctcatatgatttcagtactgtagtgtcagtactattagtttcgatcagatcaatgtctagatctatagaatcaaaacacgataggtcagaagataatgaatatctgtacgcttctttttgtactgtaacttctcgttttgttagatgtttgcatcgtgctttaacatcaatggtacaaattttatcctcgctttgtgtatcatattcgtccctactataaaattgtatattcagattatcatgagatgtgtatacgctaacggtatcaataaacggagcacaccatttagtcataaccgtaatccaaaaatttttaaagtatatcttaacgaaagaagttgtatcatcgttaggatttggtaaatcattatctacagtgtatggtactagatcctcataagtgtatatatctagagtaatgtttaatttatcaaatggttgataatatggatcctcatgacaatttccgaagatggaaatgagatatagacatgcaataaatctaatcgaagacatggttactccttaaaaaaatacgaataatcaccttggctatttagtaagtgtcatttaacactatactcatattaatccatggactcataatctctatacgggattaacggatgttctatatacggggatgagtagttctcttctttaactttatactttttactaatcatatttagactgatgtatgggtaatagtgtttgaagagctcgttctcatcatcagaataaatcaatatctctgtttttttgttatacagatgtattacagcctcatatattacgtaatagaacgtgtcatctaccttattaactttcaccgcatagttgtttgcaaatacggttaatcctttgacctcgtcgatttccgaccaatctgggcgtataatgaatctaaactttaatttcttgtaatcattcgaaataatttttagtttgcatccgtagttatcccctttatgtaactgtaaatttctcaacgcgatatctccattaataatgatgtcgaattcgtgctgtatacccatactgaatggatgaacgaataccgacggcgttaatagtaatttactttttcatctttacatattgggtactagttttactatcataagtttataaattccacaagctactatggaataagccaaccatcttagtataacacacatgtcttaaagtttattaattaattacatgttgttttatatatcgctacgaatttaaacagagaaatcagtttaggaaaaaaaattatctatctacatcatcacgtctctgtattctacgatagagtgctactttaagatgagacatatccgtgtcatcaaaaatatactccattaaaatgattattccggcagcgaacttgatattggatatatcacaacctttgttaatatctacgacaatagacagcagtcccatggttccataaacagtgagtttatctttctttgaagagatattttgtagagatcttataaaactgtcgaatgacatcgcatttatatctttagctaaatcgtatatgttaccatcgtaatatctaaccgcgtctatcttaaacgtttccatcgctttaaagacgtttccgatagatggtctcatttcatcagtcatactgagccaacaaatataatcgtgtataacatctttgatagaatcagactctaaagaaaacgaatcggctttattatacgcattcatgataaacttaatgaaaaatgtttttcgttgtttaagttggatgaatagtatgtcttaataattgttattatttcattaattaatatttagtaacgagtacactctataaaaacgagaatgacataactagttatcaaagtgtctaggacgcgtaattttcatatggtatagatcctgtaagcattgtctgtattctggagctattttctctatcgcattagtgagttcagaatatgttataaatttaaatcgaataacgaacataactttagtaaagtcgtctatattaactcttttattttctagccatcgtaataccatgtttaagatagtatattctctagttactacgatctcatcgttgtctagaatatcacatactgaatctacatccaattttagaaattggtctgtgttacatatctcttctatattattgttgatgtattgtcgtagaaaactattacgtagaccattttctttataaaacgaatatatagtactccaattatctttaccgatatatttgcacacataatccattctctcaatcactacatctttaagattttcgttgttaagatatttggctaaactatataattctattagatcatcaacagaatcagtatatatttttctagatccaaagacgaactctttggcgtcctctataatattcccagaaaagatattttcgtgttttagtttatcgagatctgatctgttcatatacgccatgattgtacggtacgttatgataaccgcataaaataaaaatccattttcatttttaaccaatactattcataattgagattgatgtaatactttgttactttgaacgtaaagacagtacacggatccgtatctccaacaagcacgtagtaatcaaatttggtgttgttaaacttcgcaatattcatcaatttagatagaaacttatactcatcatctgttttaggaatccatgtattattaccactttccaacttatcattatcccaggctatgtttcgtccatcatcgttgcgcagagtgaataattcttttgtattcggtagttcaaatatatgatccatgcatagatcggcaaagctattgtagatgtgatttttcctaaatctaatataaaactcgtttactagcaaacactttcctgatttatcgaccaagacacatatggtttctaaatctatcaagtggtggggatccatagttatgacgcagtaacatatattattacattcttgactgtcgctaatatctaaatatttattgttatcgtattggattctgcatatagatggcttgtatgtcaaagatatagaacacataaccaatttatagtcgcgctttacattctcgaatctaaagttaagagatttagaaaacattatatcctcggatgatgttatcactgtttctggagtaggatatattaaagtctttacagatttcgtccgattcaaataaatcactaaataatatcccacattatcatctgttagagtagtatcattaaatctattatattttatgaaagatatatcactgctcacctctatatttcgtacatttttaaactgtttgtataatatctctctgatacaatcagatatatctattgtgtcggtagacgataccgttacatttgaattaatggtgttccattttacaacttttaacaagttgaccaattcatttctaatagtatcaaactctccatgattaaatattttaatagtatccattttatatcactacggacacaaagtagctgacataaaccattgtataatttttatgttttatgtttattagcgtacacattttggaagttccggcttccatgtatttcctggagagcaagtagatgatgaggaaccagatagtttatatccgtacttgcacttaaagtctacattgtcgttgtatgagtatgatcttttaaacccgctagacaagtatccgtttgatattgtaggatgtggacatttaacaatctgacacgtgggtggatcggaccattctcctcctgaacacaggacaccagagttaccaatcaacgaatatccactattgcaactataagttacaacgcttccatcggtataaaaatcctcgtatccgttatgtcttccgttggatatagatggaggggattggcatttaacagattcacaaataggtgcctcgggattccataccatagatccagtagatcctaattcacaatacgatttagattcaccgatcaaatgatatccgctattacaagagtacgttatactagagccaaagtctactccaccaatatcaagttggccattatcgatatctcgaggcgatgggcatctccgtttaatacattgattaaagagtgtccatccagtacctgtacatttagcatatataggtcccattttttgctttctgtatccaggtagacatagatattctatagtgtctcctatgttgtaattagcattagcatcagtctccacactattcttaaatttcatattaatgggtcgtgacggaatagtacagcatgatagaacgcatcctattcccaacaatgtcaggaacgtcacgctctccaccttcatatttatttatccgtaaaaatgttatcctggacatcgtacaaataataaaaagcccatatatgttcgctattgtagaaattgtttttcacagttgctcaaaaacgatggcagtgacttatgagttacgttacactttggagtctcatctttagtaaacatatcataatattcgatattacgagttgacatatcgaacaaattccaagtatttgattttggataatattcgtattttgcatctgctataattaagatataatcaccgcaagaacacacgaacatctttcctacatggttaaagtacatgtacaattctatccatttgtcttccttaactatatatttgtatagataattacgagtctcgtgagtaattccagtaattacatagatgtcgccgtcgtactctacagcataaactatactatgatgtctaggcatgggagacttttttatccaacgatttttagtgaaacattccacatcgtttaatactacatatttttcatacgtggtataaactccacccattacatatatatcatcgtttacgaataccgacgcgcctgaatatctaggagtaattaagtttggaagtcttatccatttcgaagtgccgtgtttcaaatattctgccacacccgttgaaatagaaaattctaatcctcctattacatataactttccatcgttaacacaagtactaacttctgattttaacgacgacatattagtaaccgttttccattttttcgtttcaagatctacccgcgatacggaataaacatgtctattgttaatcatgccgccaataatgtatagacaattatgtaaaacatttgcattatagaattgtctatctgtattaccgactatcgtccaatattctgttctaggagagtaatgggttattgtggatatataatcagagtttttaatgactactatattatgttttataccatttcgtgtcactggctttgtagatttggatatagttaatcccaacaatgatatagcattgcgcatagtattagtcataaacttgggatgtaaaatgttgatgatatctacatcgtttggatttttatgtatccactttaataatatcatagctgtaacatcctcatgatttacgttaacgtcttcgtgggataagatagttgtcagttcatcctttgataattttccaaattctggatcggatgtcttaaggaagttcctatactttctagagaataggaacttcttacttgtacagctcgtccatgccgagagtgatcccggcggcggtcacgaactccagcaggaccatgtgatcgcgcttctcgttggggtctttgctcagggcggactgggtgctcaggtagtggttgtcgggcagcagcacggggccgtcgccgatgggggtgttctgctggtagtggtcggcgagctgcacgctgccgtcctcgatgttgtggcggatcttgaagttcaccttgatgccgttcttctgcttgtcggccatgatatagacgttgtggctgttgtagttgtactccagcttgtgccccaggatgttgccgtcctccttgaagtcgatgcccttcagctcgatgcggttcaccagggtgtcgccctcgaacttcacctcggcgcgggtcttgtagttgccgtcgtccttgaagaagatggtgcgctcctggacgtagccttcgggcatggcggacttgaagaagtcgtgctgcttcatgtggtcggggtagcggctgaagcactgcacgccgtaggtcagggtggtcacgagggtgggccagggcacgggcagcttgccggtggtgcagatgaacttcagggtcagcttgccgtaggtggcatcgccctcgccctcgccggacacgctgaacttgtggccgtttacgtcgccgtccagctcgaccaggatgggcaccaccccggtgaacagctcctcgcccttgctcaccatttttagagagaactaacacaaccagcaataaaactgaacctactttatcatttttttattcatcatcctcgaagttcctatactttctagagaataggaacttcgcggccgctcaggcctttttcagggcgtagtggtggtcgttaggcagcactcccaggcttctggcgatctgggagtagaagctagaaaagctgccgagggccaggatgcccacggtgtacatagcccaggtttccagtccgaaggtggcaggtctcagcttcaggtgatatgccactctctcgctcagttggctgtgttcgttcagacaacagctttgcaggtgggtcaggccaaaggcgctctcgttcacgccccgcacgtgcacggtctgagcggggcaatcctggtgctgggctctgaaatggtcctggcaagagatgccgtccacgtgtctgcgagtattgttgcccacctcgatcagcagtgtgttgtcggcaggatggtgggagaaggccaccacggtgttgttgcttgtctgccggcagcagtacacgtccagtgtcatcagggccatatctccttggtggtagacggcgtaggcccagccctggaacaccagtgggcacagagggccgtgagcagatgtaacagcggcggtggtcacggttgtctcggcggggctacagagcagggaccggattctcatgcacagcaggccgactgtcagaatcagggttctaggggccatcacggcgcaggtgaagccgattctggtattagagaacttgttcattatacgaagttatgtcgagttatgatctacttccttaccgtgcaataaattagaatatattttctacttttacgagaaattaattattgtatttattatttatgggtgaaaaacttactataaaaagcgggtgggtttggaattagtgaccgcggtcagccgttgttctttgggtggttcttccgcacaggtttcttggtaggagcgcacaggtcggttctagcggttccgcgcaggccggctctgtcgttagggccgccgtcaggctcgtcgccagagctgccgtcccgttccttatcgccgctggccacgtcgccctcgctgctctcgtcggtgggttcctcatcggttccgccggcagggcccaccagcacggtcagctcgatgttatcttcattagctgtaggccttctaggtctccggtaggggagcacggtcactcttgtgttgttggcggcgtacagggcccgcacggtgccgctgacccggcagatgccgccgaaggcgaacacgatgaagatttggtaaaagccgaagaagcacaggaagcccagcacggcgccggggctgaatgtgccagcaggggctgtcaggatgaccagcagggtccaggtacacagggccactcccaccagtccggcgaccaccacgctcatcagcaggaacagctcgaagatttcctgtctttccatttctggccacaggttcagtctgctccgccactgggttcttgttctatagatcactctgcacatctgacaggcggtgtttctggacacggtcagccatgtagacagacattgagggtgcaccacgtccagctcgccggtgcaggcgcaggggtgaataccctcatttcccacctcttcccggcagatccagcagatggggccctcaacgccctcttccacgtccttggaggccatcccgggtacgatacaaacttaacggatatcgcgataatgaaataatttatgattatttctcgctttcaatttaacacaaccctcaagaacctttgtatttattttcattttttaagtatagaataaagaatctataaaaactaaaaaaattatacatcataaaccaatttcctagttgtttgtaactttaagtcgacaaatctcgtaagataaagtttatacaagtgtagatgataaattctacagaggttaatatagaagcacgtaataaattgacgacgttatgactatctatatatacctttccagtatacgagtaaataactatagaagttaaactgtgaatgtcaaggtctagacaaacccttgtaactggatctttatttttcgtgtatttttgacgtaaatgtgtgcgaaagtaaggagataactttttcaatatcgtagaattgactattatattgccacctatagcatcaataattgttttgaatttcttagtcatagacaatgctaatatattcttacagtacacagtattgacaaatatcggcatttatgtttctttaaaagtcaacatctaaagaaaaatgattatcttcttgagacataactcccattttttggtattcacccacacgtttttcgaaaaaattagtttttccttccaatgatatattttccatgaaatcaaacggattggtaacattataaatttttttaaatcccaattcagaaatcaatctatccgcgacaaattctatatatgttttcatcatttcacaattcattcctataagtttaactggaagagccgcagtaagaaattcttgttcaatggatactgcatctgttataatagatctaacggtttcttcactcggtggatacaataaatgtttaaacatcaaacatgcgaagtcgcagtgcagaccctcgtctctactaattagttcgttggaaaacgtgagtccgggcattaggccacgctttttaagccaaaatatggaagcgaatgatccggaaaagaagattccttctactgcagcaaaggcaataagtctctctccataaccggcgctgtcatgtatccacttttgagcccaatcggccttcttttttacacaaggcattgtttctatggcattaaagagatagtttttttcattactatctttaacataagtatcgatcaaaagactatacatttccgaatgaatgttttcaatggccatctgaaatccgtagaaacatctagcctcggtaatctgtacttctgtacaaaatcgttccgccaaattttcattcactattccgtcactggctgcaaaaaacgccaatacatgttttataaaatatttttcgtctggtgttagtttattccaatcattgatatctttagatatatctacttcttccactgtccaaaatgatgcctctgcctttttatacatgttccagatgtcataatattggattgggaaaataacaaatctatttggatttggtgcaaggatgggttccataactaaattaacaatatcaataaattttttttcagttatctatatgcctgtacttggattttttgtacatcgatatcgccgcaatcactacaataattacaagtattattgatagcattgttattagtactatcataattaaattatcgacattcatgggtgctgaataatcgttattatcatcattatcattttgtaattgtgacatcatactagataaatcgtttgcgagattgttgtgggaagcgggcatggaggatgcattatcattattatttaacgccttccattcggattcacaaatatggcgcgcgttcaacattttatggaaactataattttgtgaaaacagataacaagaaaactcgtcatcgttcaaatttttaacgatagtaaaccgattaaacgtcgagctaatttctaacgctagcgactctgttggatatgggtttccagatatatatcttttcagttcccctacgtatctataatcatctgtaggaaatggaagatatttccatttatctactgttcctaatatcatatgtggtggtgtagtagaaccattaagcgcgaaagatgttatttcgcatcgtattttaacttcgcaataatttctggttagataacgcactctaccagtcaagtcaatgatattagcctttacagatatattcatagtagtcgtaacgatgactccatcttttagatgcgatactcctttgtatgtaccagaatcttcgtacctcaaactcgatatatttaaacaagttaatgagatattaacgcgttttatgaatgatgatatataaccagaagttttatcctcggtggctagcgctataaccttatcattataataccaactagtgtgattaatatgtgacacgtcagtgtgggtacaaatatgtacattatcgtctacgtcgtattcgatacatccgcatacagccaacaaatataaaatgacaaatactctaacgacgttcgtacccatcttgatgcggtttaataaatgttttgatttcaatttattgtaaaaaaagattcggttttatactgttcgatattctcattgcttatattttcatctatcatctccacacagtcaaatccgtggttagcatgcacctcatcaaccggtaaaagactatcggactcttctatcattataactctagaatatttaatttggtcattattaatcaagtcaattatcttatttttaacaaacgtgagtattttactcattttttataaaaacttttagaaatatacagactctatcgtgtgtctatatcttctttttatatccaatgtatttatgtctgatttttcttcatttatcatatataatggtccaaattctacacgtgcttcggattcatccagatcattaaggttcttataattgtaacatccttctcttccctcttctacatcttccttcttattcttattcttattcttattcttattcttattcttattcttattcttagcgtcacagaatctaccacagcagaatcccatgacgagcgtcatattaaactaattcattttcaattataatatacgattagtaatgaccattaaaataaaaaatattcttcataaccggcaagaaagtgaaaagttcacattgaaactatgtcagtagtatacatcatgaaatgatgatatatatatattctctattttggtggaggattatatgatataattcgtggataatcattcttaagacacatttcttcattcgtaaatcttttcacgttaaatgagtgtccatattttgcaatttcttcatatgatggcggtgtacgtggacgaggctgctcctgttcttgttgtggtcgccgactatcgtgtttgcgtttagatccctccattatcgcgattgcgtagatggagtactattttataccttgtaattaaatttttttattaattaaacgtataaaaacgttccgtatctgtatttaagagccagatttcgtctaatagaacaaatagctacagtaaaaataactagaataattgctacacccactagaaaccacggatcgtaatacggcaatcggttttcgataataggtggaacgtatattttatttaaggacttaacaattgtctgtaaaccacaatttgcttcagcggatcctgtattaactatctgtaaaagcatatgttgaccgggcggagccgaacattctccgatatctaatttctgtatatctataatattattaacctccgcatacgcattacagttcttttctagcttggataccgcactaggtacatcgtctagatctattcctatttcctcagcgatagctcttctatccttttccggaagcaatgaaatcacttcaataaatgattcaaccatgagtgtgaaactaagtctagaattactcatgcatttgttagttattcggagcgcgcaatttttaaactgtcctataacctctcctatatgaatagcacaagtgacattagtagggatagaatgttgagctaatttttgtaaataactatctataaaaagattatacaaagttttaaactctttagtttccgccatttatccagtctgagaaaatgtctctcataataaatttttccaagaaactaattgggtgaagaatggaaacctttaatctatatttatcacagtctgttttggtacacatgatgaattcttccaatgccgtactaaattcgatatctttttcgatttctggatatgtttttaataaagtatgaacaaagaaatggaaatcgtaataccagttatgtttaactttgaaattgttttttattttcttgttaatgattccagccacttgggaaaagtcaaagtcgtttaatgccgatttaatacgttcattaaaaacaaactttttatcctttagatgaattattattggttcattggaatcaaaaagtaagatattatcgggtttaagatctgcgtgtaaaaagttgtcgcagcatggtagttcgtagattttaatgtataacagagccatctgtaaaaagataaactttatgtattgtaccaaagatttaaatcctaatttgatagctaactcggtatctactttatctgccgaatacagtgctaggggaaaaattataatgtttcctctttcatattcgtagttagttctcttttcatgttcgaaaaagtgaaacatgcggttaaaatagtttataacattaatattactgttaataactgccgggtaaaagtgggatagtaatttcacgaatttgatactgtcctttctctcgttaaacgcctttagaaaaactttagaagaatatctcaatgagagttcctgaccatccatagtttgtatcaataatagcaacatatgaagaacacgtttatacagagtatgtaaaaatgttaatttatagtttaatcccatggcccacgcacacacgattaattttttttcatctccctttagattgttgtatagaaatttgggtactgtgaactccgccgtagtttccatgggactatataattttgtggcctcgaatacaaattttactacatagttatctatcttaaaaactataccatatcctcctgtagatatgtgataaaaatcgtcgtttataggataaaatcgtttatccttttgttggaaaaatgatgaattaatgtaatcattctcttctatctttagtagtgtttccctattaaaattcttaaaataatttaacaatctaactgacggagcccaattttggtgtaaatctaattgggacattatgttgttaaaatataaacagtctcctaatataacagtatctgataatctatggggagacatccattgatattcaggggatgaatcattggcaacacccatttattgtacaaaaagccccaatttacaaacgaaagtccaggtttgatagagacaaactattaactattttgtctctgtttttaacacctccacagtttttaatttctttggtaatgaaattattcacaatatcagtatcttctttatctaccagagattttactaacttgataaccttggctgtctcattcaatagggtagtaatatttgtatgtgtgatattgatatctttttgaattgtttcttttagaagtgattctttgatggtgtcagcatacgaattacaataatgcagaaactcggttaacatgcaggaattatagtaagccaattccaattgttgcctgtgttgtattagagtgtcaatatgagcaatggtgtccttgcgtttctctgatagaatgcgagcagcgattttggcgttatcatttgacgatatttctggaatgacgaatcctgtttctactaactttttggtaggacaaagtgaaacaatcaagaagatagcttctcctcctatttgtggaagaaattgaactcctctagatgatctactgacgatagtatctccttgacagatattggaccgaattacagaagtacctggaatgtaaagccctgaaaccccctcattttttaagcagattgttgccgtaaatcctgcactgtgaccaagatagagagctcctttggtgaatccatctctatgtttcagtttaaccaagaaacagtcagctggtctaaaatttccatctctatctaatacagcatctaacttgatgtcaggaactatgaccggtttaatgttatatgtaacattgagtaaatccttaagttcataatcatcactgtcatcagttatgtacgatccaaacaatgtttctaccggcatagtggatacgaagatgctatccatcagaatgtttccctgattagtattttctatatagctattcttctttaaacgattttccaaatcagtaactatgttcatttttttaggagtaggacgcctagccagtatggaagaggattttctagatcctctcttcaacatctttgatctcaatggaatgcaaaaccccatagtgaaacaaccaacgataaaaataatattgtttttcactttttataattttaccatctgactcatggattcattaatatctttataagagctactaacgtataattctttataactgaactgagatatatacaccggatctatggtttccataattgagtaaatgaatgctcggcaataactaatggcaaatgtatagaacaacgaaattatactagagttgttaaagttaatattttctatgagctgttccaataaattatttgttgtgactgcgttcaagtcataaatcatcttgatactatccagtaaaccgtttttaagttctggaatattattatcccattgtaaagcccctaattcgactatcgaatatcctgctctgatagcagtttcaatatcgacggacgtcaatactgtaataaaggtggtagtattgtcatcatcgtgataaactactggaatatggtcgttagtaggtacggtaactttacacaacgcgatatataactttccttttgtaccatttttaacgtagttgggacgtcctgcagggtattgttttgaagaaatgatatcgagaacagatttgatacgatatttgttggattcctgattatttactataatataatctagacagatagatgattcgataaatagagaaggtatatcgttggtaggataatacatccccattccagtattctcggatactctattaatgacactagttaagaacatgtcttctattctagaaaacgaaaacatcctacatggactcattaaaacttctaacgctcctgattgtgtctcgaatgcctcgtacaaggatttcaaggatgccatagattctttgaccaacgatttagaattgcgtttagcatctgatttttttattaaatcgaatggtcggctctctggtttgctaccccaatgataacaatagtcttgtaaagataaaccgcaagaaaatttatacgcatccatccaaataaccctagcaccatcggatgatattaatgtattattatagattttccatccacaattattgggccagtatactgttagcaacggtatatcgaatagattactcatgtaacctactagaatgatagttcgtgtactagtcataatatctttaatccaatctaagaaatttaaaattagattttttacactgttaaagttaacaaaggtattacccgggtacgtggatatcatatatggtattggtccattatcagtaatagctccataaactgatacggcgatggtttttatatgtgtttgatctaacgaggaagaaattcgcacccacaattcatctctagatatgtatttaatatcaaacggtaacacatcaatttcgggacgcgtatatgtttctaaatttttaatccaaatataatgatgacctatatgccctattatcatactgtcaactatagtacacctagagaacttacgatacatctgtttcctataatcgttaaattttacaaatctataacatgctaaaccttttgacgacaaccattcattaatttctgatatggaatctgtattctcgataccgtattgttctaaagccagtgctatatctccctgttcgtgggaacgctttcgtataatatcgatcaacggataatctgaagtttttggagaataatatgactcatgatctatttcgtccataaacaatctagacataggaattggaggcgatgatcttaattttgtgcaatgagtcgtcaatcctataacttctaatcttgtaatattcatcatcgacataatactatctatgttatcatcgtatattagtataccatgaccttcttcatttcgtgccaaaatgatatacagtcttaaatagttacgcaatatctcaatagtttcataattgttagctgttttcatcaagatttgtaccctgtttaacatgatggcgttctatacgtttctattttctattttttaaatttttaaatttttaacgatttactgtggctagatacccaatctctctcaaatatttttttagcctcgcttacaagctgtttatctatactattaaaactgacgaatccgtgattttggtaatgggttccgtcgaaatttgccgaagtgatatgaacatattcgtcgtcgactatcaacaattttgtattattctgaatagtgaaaaccttcacagatagatcattttgaacacacaacgcgtctagacttctggcggttgccatagaatatacgtcgttcttatcccaattaccaactagaagtctgatcttaactcctctattaatggctgcttctataatggagttgtaaatgtcgggccaatagtagctattaccgtcgacacgtgtagtgggaactatggccaaatgttcaatatctatactagtcttagctgacctgagtttatcaataactacatcggtatctagatctctagaatatcccaataggtgttccggagaatcagtaaagaacactccacctataggattcttaatatgatacgcagtgctaactggcagacaacaagccgcagagcataaattcaaccatgaattttttgcgctattaaaggctttaaaagtatcaaatcttctacgaagatctgtggccagcgggggataatcagaatatacacctaacgttttaatcgtatgtatagatcctccagtaaatgacgcgtttcctacataacatctttcatcatctgacacccaaaaacaaccgagtagtagtcccacattattttttttatctatattaacggttataaaatttatatccgggcagtgactttgtagctctcccagatttcttttccctcgttcatctagcaaaactattattttaatccctttttcagatgcctcttttagtttatcaaaaataagcgctcccctagtcgtactcagaggattacaacaaaaagatgctatgtatatatatttcttagctagagtgataatttcgttaaaacattcaaatgttgttaaatgatcggatctaaaatccatattttctggtagtgtttctaccagcctacattttgctcccgcaggtaccgatgcaaatggccacatttagttaacataaaaacttatacatcctgttctatcaacgattctagaatatcatcggctatatcgctaaaattttcatcaaagtcgacatcacaacctaactcagtcaatatattaagaagttccatgatgtcatcttcgtctatttctatatccgtatccattgtagattgttgaccgattatcgagtttaaatcattactaatactcaatccttcagaatacaatctgtatttcattgtaaatttataggcggtgtatttaagttggtagattttcaattatgtatcaatatagcaacagtagttcttgctcctccttgattctagcatcctcttcattattttcttctacgtacataaacatgtccaatacgttagacaacacaccgacgatggcggccgccacagacacgaatatgactagaccgatgaccatttaaaaacccctctctagctttcacttaaactgtatcgatcattcttttagcacatgtataatataaaaaaacattattctatttcgaatttaggcttccaaaaatttttcatccgtaaaccgataataatatatatagacttgttaatagtcggaataaatagattaatgcttaaactatcatcatctccacgattagagatacaatatttacattctttttgctgtttcgaaactttatcaatacacgttaatacaaacccaggaaggagatattgaaactgaggctgttgaaaatgaaacggtgaatacaataattcagataatgtaaaatcatgattccgtattctgatgatattagaactgctaatggatgtcgatggtatgtatctaggagtatctattttaacaaagcatcgatttgctaatatacaattatcattttgattaattgttattttattcatattcttaaaaggtttcatatttatcaattcttctacattaaaaatttccatttttaatttatgtagccccgcaatactcctcattacgtttcattttttgtctataatatccattttgttcatctcggtacatagattatccaattgagaagcgcatttagtagttttgtacattttaagtttattgacgaatcgtcgaaaactagttatagttaacattttattatttgataccctgatattaatacccctgccgttactattatttataactgatgtaacccacgtaacattggaattaactatcgatagtaatgcatcgacgcttccaaaattgtctattataaactcaccgataatttttttattacatgttttcatattcattaggattatcaaatctttaatcttactacgattgtatgcgttgatattacaagacgtcattctaaaagacggaggatttccatcaaatgccagacaatcacgtacaaagtacatggaaataggttttgttctattgcgcatcatagattcatatagaacacccgtagaaatactaatttgttttactctataaaatactaatgcatctatttcatcgttttgtataacgtctttccaagtgtcaaattccaaatttttttcattgatagtaccaaattcttctatctctttaactacttgcatagataggtaattacagtgatgcctacatgccgttttttgaaactgaatagatgcgtctagaagcgatgctacgctagtcacaatcaccactttcatatttagaatatatgtatgtaaaaatatagtagaatttcattttgtttttttctatgctataaatgaattctcattttgcatctgctcatactccgttttatatcaataccaaagaaggaagatatctggttctaaaagccgttaaagtatgcgatgttagaactgtagaatgcgaaggaagtaaagcttcctgcgtactcaaagtagataaaccctcatcacccgcgtgtgagagaagaccttcgtccccgtccagatgcgagagaatgaataaccctggaaaacaagtcccgtttatgaggacggacatgctacaaaatatgttcgcggctaatcgcgataatgtagcttctagacttttgaactaaaatacaattatatctttttcgatattaataaatccgtgtcgtccaggttttttatctctttcagtatgtgaatagataggtattttatctctattcatcatcgaatttaagagatccgataaacattgtttgtattctccagatgtcagcatctgatacaacaatatatgtgcacataaacctctggcacttatttcatgtaccttccccttatcactaaggagaatagtatttgagaaatatgtatacatgatattatcatgaattagatatacagaatttgtaacactctcgaaatcacacgatgtgtcggcgttaagatctaatatatcactcgataacacattttcatctagatacactagacattttttaaagctaaaatagtctttagtagtgacagtaactatgcgattattttcatcgatgatacatttcatcggcatattattacgcttaccatcaaagactataccatgtgtatatctaacgtattctagcatagttgccatacgtgcattaaacttttcaggatctttggatagatcttccaatctatctatttgagaaaacatttttatcatgttcaatagttgaaacgtcggatccactatatagatattatctataaagattttaggaactacgttcatggtatcctggcgaatattaaaactatcaatgatatgattatcgttttcatcttttatcaccatatagtttctaagatatgggattttacttaatataatattatttcccgtaataaattttattagaaatgccaaatctataagaaaagtcctcgaattagtttgaagaatatctatatcgccgtaccgtatatttggattaattagatatagagaatatgatccgtaacatatacaacttttattatggcgtctaagatattcttccatcaacttattaacatttttgactagggaagatacattatgacgtcccattacttttgccttgtctattattgcgacgttcatagaatttagcatatctcttgccaattcttccattgatgttacattataagaaattttagatgaaattacatttggagctttaatagtaagaactcctaatatgtccgtgtatgtggtcactaatacagattgtagttctataatcgtaaataatttacctatattatatgtttgagtctgtttagaaaagtagctaagtatacgatcttttatttctgatgcagatgtatcaacatcggaaaaaaatctttttttattcttttttactaaagatacaaatatgtctttgttaaaaacagttattttttgaatatttctagcttgtaattttaacatatgatattcattcacactaggtactctgcctaaataggtttctataatctttaatgtaatattaggaaaagtattctgatcaggattcctattcattttgaggatttaaaactctgattattgtctaatatggtctctacgcaaactttttcacagagcgatagagtttttgataactcgtttttcttaagaaatataaaactactgtctccagagctcgctctatcttttattttatttaattcgatacaaactcctgatactggttcagaaagtaattcattaattttcagtcctttatagaagatatttaatatagataatacaaaatcttcagtttttgatatcgatctgattgatcctagaactagatatattaataacgtgctcattaggcagtttatggcagcttgataattagatatagtatattccagttcatatttattagataccgcattgcccagattttgatattctatgaattcctctgaaaataaatccaaaataactaaacattctattttttgtggattagtgtactctcttccctctatcatgttcactactggtgtccacgatgataaatatctagagggaatataatatagtccataggatgccaatctagcaatgtcgaataactgtaatttgattcttcgttcttcattatgaattgattcttgaggtataaacctaacacaaattatattattagacttttcgtatgtaatgtctttcatgttataagtttttaatcctggaatagaatctattttaatgaggcttttaaacgcagagttctccaacgagtcaaagcataatactctgttgtttttcttatatacgatgttacgattttcttctttgaatggaataggtttttgaattagtttataattacaacataatagataaggaagtgtgcaaatagtacgcggaaaaaacataatagctcccctgttttcatccatggttttaagtaaatgatcactggcttctttagttaatggatattcgaacattaaccgtttcatcatcattggacagaatccatatttcttaatgtaaagagtgatcaaatcattgtgtttattgtaccatcttgttgtaaatgtgtattcggttatcggatctgctcctttttctattaaagtatcgatgtcgatctcgtctaagaattcaactatatcgacatatttcatttgtatacacataaccattactaacgtagaatgtataggaagagatgtaacgggaacagggtttgttgattcgcaaactattctaatacataattcttctgttaatacgtcttgcacgtaatctattatagatgccaagatatctatataattattttgtaagatgatgttaactatgtgatctatataagtagtgtaataattcatgtatttcgatatatgttccaactctgtctttgtgatgtctagtttcgtaatatctatagcatcctcaaaaaatatattcgcatatattcccaagtcttcagttctatcttctaaaaaatcttcaacgtatggaatataataatctattttacctcttctgatatcattaatgatatagtttttgacactatcttctgtcaattgattcttattcactatatctaagaaacggatagcgtccctaggacgaactactgccattaatatctctattatagcttctggacataattcatctattataccagaattaatgggaactattccgtatctatctaacatagttttaagaaagtcagaatctaagacctgatgttcatatattggttcatacatgaaatgatctctattgatgatagtgactatttcattctctgaaaattggtaactcattctatatatgctttccttgttgatgaaggatagaatatactcaatagaatttgtaccaacaaactgttctcttatgaatcgtatatcatcatctgaaataatcatgtaaggcatacatttaacaattagagacttgtctcctgttatcaatatactattcttgtgataatttatgtgtgaggcaaatttgtccacgttctttaattttgttatagtagatatcaaatccaatggagctacagttcttggcttaaacagatatagtttttctggaacaaattctacaacattattataaaggactttgggtagataagtgggatgaaatcctattttaattaatgctatcgcattgtcctcgtgcaaatatccaaacgcttttgtgatagtatggcattcattgtctagaaacgctctacgaatatctgtgacagatatcatctttagagaatatactagtcgcgttaatagtactacaatttgtattttttaatctatctcaataaaaaaattaatatgtatgattcaatgtataactaaactactaactgttattgataactagaatcagaatctaatgatgacgtaaccaagaagtttatctactgccaatttagctgcattatttttagcatctcgtttagattttccatctgccttatcgaatactcttccgtcgatgtctacacaggcataaaatgtaggagagttactaggcccaactgattcaatacgaaaagaccaatctctcttagttatttggcagtactcattaataatggtgacagggttagcatctttccaatcaataatttttttagccggaataacatcatcaaaagacttatgatcctctctcattgatttttcgcgggatacatcatctattatgacgtcagccatagcatcagcatccggcttatccgcctccgttgtcataaaccaacgaggaggaatatcgtcggagctgtacaccatagcactacgttgaagatcgtacagagctttattaacttctcgcttctccatattaagttgtctagttagttgtgcagcagtagctccttcgattccaatgtttttaatagccgcacacacaatctctgcgtcagaacgctcgtcaatatagatcttagacatttttagagagaactaacacaaccagcaataaaactgaacctactttatcatttttttattcatcatcctctggtggttcgtcgtttctatcgaatgtagctctgattaacccgtcatctataggtgatgctggttctggagattctggaggagatggattattatctggaagaatctctgttatttccttgttttcatgtatcgattgcgttgtaacattaagattgcgaaatgctctaaatttgggaggcttaaagtgttgtttgcaatctctacacgcgtgtctaactagtggaggttcgtcagctgctctagtttgaatcatcatcggcgtagtattcctacttttacagttaggacacggtgtattgtatttctcgtcgagaacgttaaaataatcgttgtaactcacatcctttattttatctatattgtattctactcctttcttaatgcattttataccgaataagagatagcgaaggaattctttttcggtgccgctagtacccttaatcatatcacatagtgttttatattccaaatttgtggcaatagacggtttatttctatacgatagtttgtttctggaatcctttgagtattctataccaatattattctttgattcgaatttagtttcttcgatattagattttgtattacctatattcttgatgtagtactttgatgatttttccatggcccattctattaagtcttccaagttggcatcatccacatattgtgatagtaattctcggatatcagtagcggctaccgccattgatgtttgttcattggatgagtaactactaatgtatacattttccatttataacacttatgtattaactttgttcatttatattttttcattattatgttgatattaacaaaagtgaatatatatgttaataattgtattgtggttatacggctacaatttcataatgagtggaagtcagtgtccgatgatcaatgacgatagctttactctgaaaagaaagtatcaaatcgatagtgcggagtcaacaatgaaaatggataagaagaggacaaagtttcagaatagagccaaaatggtaaaagaaataaatcagacaataagagcagcacaaactcattacgagacattgaaactaggatacataaaatttaagagaatgattaggactactactctagaagatatagcaccatctattccaaataatcagaaaacttataaactattctcggacatttcagccatcggcaaagcatcacagaatccgagtaagatggtatatgctctgctgctttacatgtttcccaatttgtttggagatgatcatagattcattcgttatagaatgcatccaatgagtaaaatcaaacacaagatcttctctcctttcaaacttaatcttattagaatattagtggaagaaagattctataataatgaatgcagatctaataaatggagaataattggaacacaagttgataaaatgttgatagctgaatctgataaatatacaatagatgcaaggtataacctaaaacccatgtatagaatcaagggaaaatctgaagaagataccctcttcatcaaacagatggtagaacaatgtgtgacatcccaggaattggtggaaaaagtgttgaagatactgtttagagatttgttcaagagtggagaatacaaagcgtacagatacgatgatgatgtagaaaatggatttattggattggatacactaaaattaaacattgttcatgatatagttgaaccatgtatgcctgttcgtaggccagtggctaagatactgtgtaaagaaatggtaaataaatactttgagaatccgctacatattattggtaaaaatcttcaagagtgcattgactttgttagtgaataggcatttcatctttctccaatactaattcaaattgttaaattaataatggatagtataaatagttattagtgataaaatagtaaaaataattattagaataagagtgtagtatcatagataactctcttctataaaaatggattttattcgtagaaagtatcttatatacacagtagaaaataatatagattttttaaaggatgatacattaagtaaagtaaacaattttaccctcaatcatgtactagctctcaagtatctagttagcaattttcctcaacacgttattactaaggatgtattagctaataccaatttttttgttttcatacatatggtacgatgttgtaaagtgtacgaagcggttttacgacacgcatttgatgcacccacgttgtacgttaaagcattgactaagaattatttatcgtttagtaacgcaatacaatcgtacaaggaaaccgtgcataaactaacacaagatgaaaaatttttagaggttgccgaatacatggacgaattaggagaacttataggcgtaaattatgacttagttcttaatccattatttcacggaggggaacccatcaaagatatggaaatcatttttttaaaactgtttaagaaaacagacttcaaagttgttaaaaaattaagtgttataagattacttatttgggcttacctaagcaagaaagatacaggcatagagtttgcggataatgatagacaagatatatacactctatttcaacaaactggtagaatcgtccatagcaatctaacagaaacgtttagagattatatctttcccggagataagactagctattgggtgtggttaaacgaaagtatagctaatgatgcggatattgttcttaatagacacgccattaccatgtatgataaaattcttagttatatatactctgagataaaacaaggacgcgttaataaaaacatgcttaagttagtttatatctttgagcctgaaaaagatatcagagaacttctgctagaaatcatatatgatattcctggagatatcctatctattattgatgcaaaaaacgacgattggaaaaaatattttattagtttttataaagctaattttattaacggtaatacatttattagtgatagaacgtttaacgaggacttattcagagttgttgttcaaatagatcccgaatatttcgataatgaacgaattatgtctttattctctacgagtgctgcggacattaaacgatttgatgagttagatattaataacagttatatatctaatataatttatgaggtgaacgatatcacattagatacaatggatgatatgaagaagtgtcaaatctttaacgaggatacgtcgtattatgttaaggaatacaatacatacctgtttttgcacgagtcggatcccatggtcatagagaacggaatactaaagaaactgtcatctataaaatccaagagtaaacggctgaacttgtttagcaaaaacattttaaaatattatttagacggacaattggctcgtctaggtcttgtgttagatgattataaaggagacttgttagttaaaatgataaaccatcttaagtctgtggaggatgtatccgcattcgttcgattttctacagataaaaaccctagtattcttccatcgctaatcaaaactattttagctagttataatatttccatcatcgtcttatttcaaaggtttttgagagataatctatatcatgtagaagaattcttggataaaagcatccatctaaccaagacggataagaaatatatacttcaattgataagacacggtagatcatagaacagaccaaatatattattaataatttggtatatacatagatattaattatcacatattaaaaattcacacatttttgataaatgggaactgctgcaacaattcagactcccaccaaattaatgaataaagaaaatgcagaaatgattttggaaaaaattgttgatcatatagttatgtatattagtgacgaatcaagtgattcagaaaataatcctgaatatattgattttcgtaacagatacgaagactatagatctctcattataaaaagtgatcacgagtttgtaaagctatgtaaaaatcatgcagagaaaagttctccagaaacgcaacaaatgattatcaaacacatatacgaacaatatcttattccagtatctgaagtactattaaaacctataatgtccatgggtgacataattacatataacggatgtaaagacaatgaatggatgctagaacaactctctaccctaaactttaacaatctccgcacatggaactcatgtagcataggcaatgtaacgcgtctgttttatacattttttagttatctgatgaaagataaactaaatatataagtataatcccattctaatactttaacctgatgtattagcatcttattagaatattaacctaactaaaagacataacataaaaactcattacatagttgataaaaagcggtaggatataaatattatggctgccaccgttccgcgttttgacgacgtgtacaaaaatgcacaaagaagaattctagatcaagaaacattttttagtagaggtctaagtagaccgttaatgaaaaacacatatctatttgataattacgcgtatggatggataccagaaactgcaatttggagtagtagatacgcaaacttagatgcaagtgactattatcccatttcgttgggattacttaaaaagttcgagtttctcatgtctctatataaaggtcctattccagtatacgaagaaaaagtaaatactgaattcatagccaatggatcgttctctggtagatacgtatcatatcttcgaaagttttctgctcttccaacaaacgagtttattagttttttattattgacctccatccctatctataatatcttattctggtttaaaaacacacagtttgatattactaaacacacattattcagatacgtctatacagataatgccaaacacctggcgttggctaggtatatgcatcaaacaggagactataagcctttgtttagtcgtctcaaagagaattatatatttaccggtcccgttccaatatgtatcaaagatatagatcaccctaatcttagtagagcaagaagtccatccgattatgagacattagctaatattagtactatattgtactttaccaagtatgatccggtattaatgtttttattgttttacgtacctgggtattcaattactacaaaaattactccagccgtagaatatctaatggataaactgaatctaacaaagagcgacgtacaactgttgtaaattattttatgcttcgtaaaatgtaggttttgaaccaaacattctttcaaagaatgagatgcataaaactttattatccaatagattgactatttcggacgtcaatcgtttaaagtaaacttcgtaaaatattctttgatcactgccgagtttaaaacttctatcgataattgtctcatatgttttaatatttacaagttttttggtccatggtacattagccggacaaatatatgcaaaataatatcgttctccaagttctatagtttctggattatttttattatattcagtaaccaaatacatattagggttatctgcggatttataatttgagtgatgcattcgactcaacataaataattctagaggagacgatctactatcaaattcggatcgtaaatctgtttctaaagaacggagaatatctatacatacctgattagaattcatccgtccttcagacaacatctcagacagtctggtcttgtatgtcttaatcatattcttatgaaacttggaaacatctcttctagtttcactagtacctttattaattctctcaggtacagattttgaattcgacgatgctgagtatttcatcgttgtatatttcttcttcgattgcataatcagattcttatataccgcctcaaactctattttaaaattattaaacaatactctattattaatcagtcgttctaactctttcgctatttctatagacttatcgacatcttgactgtctatctctgtaaacacggagtcggtatctccatacacgctacgaaaacgaaatctgtaatctataggcaacgatgttttcacaatcggattaatatctctatcgtccatataaaatggattacttaatggattggcaaaccgtaacataccgttagataactctgctccatttagtaccgattctagatacaagatcattctacgtcctatggatgtgcaactcttagccgaagcgtatgagtatagagcactatttctaaatcccatcagaccatatactgagttggctactatcttgtacgtatattgcatggaatcatagatggccttttcagttgaactggtagcctgttttaacatctttttatatctggctctctctgccaaaaatgttcttaatagtctaggaatggttccttctatcgatctatcgaaaattgctatttcagagatgaggttcggtagtctaggttcacaatgaaccgtaatatatctaggaggtggatatttctgaagcaatagctgattatttatttcttcttccaatctattggtactaacaacgacaccgactaatgtttccggagatagatttccaaagatacacacattaggatacagactgttataatcaaagattaatacattattactaaacattttttgttttggagcaaataccttaccgccttcataaggaaacttttgttttgtttctgatctaactaagatagttttagtttccaacaatagctttaacagtggacccttgatgactgtactcgctctatattcgaataccatggattgaggaagcacatatgttgacgcacccgcgtctgtttttgtttctactccataatactcccacaaatactgacacaaacaagcatcatgaatacagtatctagccatatctaaagctatgtttagattataatccttatacatctgagctaaatcaacgtcatcctttccgaaagataatttatatgtatcattaggtaaagtaggacataatagtacgactttaaatccattttcccaaatatctttacgaattactttacatataatatcctcatcaacagtcacataattacctgtggttaaaacctttgcaaatgcagcggctttgcctttcgcgtctgtagtatcgtcaccgataaacgtcatttctctaactcctctatttaatactttacccatgcaactgaacgcgttcttggatatagaatccaatttgtacgaatccaatttttcagatttttgaatgaatgaatatagatcgaaaaatatagttccattattgttattaacgtgaaacgtagtattggccatgccgcctactcccttatgactagactgatttctctcataaatacagagatgtacagcttcctttttgtccggagatctaaagataatcttctctcctgttaataactctagacgattagtaatatatctcagatcaaagttatgtccgttaaaggtaacgacgtagtcgaacgttagttccaacaattgtttagctattcgtaacaaaactatttcagaacatagaactagttctcgttcgtaatccatttccattagtgactgtatcctcaaacatcctctatcgacggcttcttgtatttcctgttccgttaacatctcttcattaatgagcgtaaacaataatcgtttaccacttaaatcgatataacagtaacttgtatgcgagattgggttaataaatacagaaggaaacttcttatcgaagtgacactctatatctagaaataagtacgatcttgggatatcgaatctaggtatttttttagcgaaacagttacgtggatcgtcacaatgataacatccattgttaatctttgtcaaatattgctcgtccaacgagtaacatccgtctggagatatcccgttagaaatataaaaccaactaatattgagaaattcatccatggtggcattttgtatgctgcgtttctttggctcttctatcaaccacatatctgcgacggagcattttctatctttaatatctagattataacttattgtctcgtcaatgtctatagttctcatctttcccaacggcctcgcattaaatggaggaggagacaatgactgatatatttcgtccgtcactacgtaataaaagtaatgaggaaatcgtataaatacggtctcaccatttcgacatctggatttcagatataaaaatctgttttcaccgtgactttcaaaccaattaatgcaccgaacatccatttatagaatttagaaatatattttcatttaaatgaatcccaaacattggggaagagccgtatggaccattatttttatagtactttcgcaagcgggtttagacggcaacatagaagcgtgtaaacgaaaactatatactatagttagcactcttccatgtcctgcatgtagacggcacgcgactattgctatagaggacaataatgtcatgtctagcgatgatctgaattatatttattattttttcatcagattatttaacaatttggcatctgatcccaaatacgcaatcgatgtgtcaaaggttaaacctttataaacttaacccattataaaacttatgattagtcacgactgaaataaccgcgtgattattttttggtataattctacacggcatggtttctgtgactatgaattcaacccccgttacattagtgaaatctttaacaaacagcaagggttcgtcaaagacataaaactcattgtttacaatcgaaatagaccccctatcacacttaaaataaaaaatatccttatcctttaccaccaaataaaattctgattggtcaatgtgaatgtattcacttaacagttccacaaatttatttattaactccgaggcacatacatcgtcggtattttttatggcaaactttactcttccagcatccgtttctaaaaaaatattaacgagttccatttatatcatccaatattattgaaatgacgttgatggacagatgatacaaataagaaggtacggtacctttgtccaccatctcctccaattcatgctctattttgtcattaactttaatgtatgaaaacagtacgccacatgcttccatgacagtgtgtaacactttggatacaaaatgtttgacattagtataattgtttaagactgtcaatctataatagatagtagctataatatattctatgatggtattgaagaagatgacaatcttggcatattgatcatttaacacagacatggtatcaacagatagcttgaatgaaagagaatcagtaattggaataagcgtcttctcgatggagtgtccgtataccaacatgtctgatattttgatgtattccattaaattatttagttttttctttttattctcgttaaacagcatttctgtcaacggaccccaacatcgttgaccgattaagttttgattgatttttccgtgtaaggcgtatctagtcagatcgtatagcctatccaataatccatcatctgtgcgtagatcacatcgtacactttttaattctctatagaagagcgacagacatctggaacaattacagacagcaatttctttattctctacagatgtaagatacttgaagacattcctatgatgatgcagaattttggataacacggtattgatggtatctgttaccataattcctttgatggctgatagtgtcagagcacaagatttccaatctttgacaatttttagcaccattatctttgttttgatatctatatcagacagcatggtgcgtctgacaacacagggattaagacggaaagatgaaatgattctctcaacatcttcaatggataccttgctattttttctggcattatctatatgtgcgagaatatcctctagagaatcagtatcctttttgatgatagtggatctcaatgacatgggacgtctaaaccttcttattctatcaccagattgcatggtgatttgtcttctttcttttatcataatgtaatctctaaattcatcggcaaattgtctatatctaaaatcataatatgagatgtttacctctacaaatatctgttcgtccaatgttagagtatctacatcagttttgtattccaaattaaacatggcaacggatttaattttatattcctctattaagtcctcgtcgataataacagaatgtagataatcatttaatccatcgtacatggttggaagatgcttgttgacaaaatctttaattgtcttgatgaaggtgggactatatctaacatcttgattaataaaatttataacattgtccataggatactttgtaactagttttatacacatctcttcatcggtaagtttagacagaatatcgtgaacaggtggtatattatattcatcagatatacgaagaacaatgtccaaatctatattgtttaatatattatatagatgtagtgtagctcctacaggaatatctttaactaagtcaatgatttcatcaaccgttagatctattttaaagttaatcatataggcattgatttttaaaaggtatgtagccttgactacattctcattaattaaccattccaagtcactgtgtgtaagaagattatattctatcataagcttgactacatttggtcccgataccattaaagaattcttatgatataaggaaacagcttttaggtactcatctactctacaagaattttggagagccttaacgatatcagtgacgtttattatttcaggaggaaaaaacctaacattgagaatgtcggagttaatagcttccagatacagtgattttggcaatagtccgtgtaatccataatccagtaacacgagctggtgcttgctagacaccttttcaatgtttaatttttttgaaataagctttgataaagccttcctcgcaaattccggatacatgaacatgtcggcgacatgattaagtattgttttttcattatttttatattttctcaacaagttctcaataccccaatagatgatagaatatcacccaatgcgtccatgttgtctatttccaacaggtcgctatatccaccaatagaagttttcccaaaaaagattctaggaacagttctaccaccagtaatttgttcaaaataatcccgcaattcattttcgggtttaaattctttaatatcgacaatttcatacgctcctcttttgaaactaaacttatttagaatatccagtgcatttctacaaaaaggacatgtatacttgacaaaaattgtcactttgttattggccaacctttgttgtacaaattcctcggccattttaatatttaagtgatataaaactatctcgacttatttaactctttagtcgagatatatggacgcagatagctatatgatagccaactacagaaggcaaacgctataaaaaacataattacgacgagcatatttataaatatttttattcagcattacttgatatagtaatattaggcacagtcaaacattcaaccactctcgatacattaactctctcattttctttaacaaattctgcaatatcttcgtaaaaagattcttgaaactttttagaatatctatcgactctagatgaaatagcgttcgtcaacatactatgttttgtatacataaaggcgcccattttaacagtttctagtgacaaaatgctagcgatcctaggatcctttagaatcacatagattgacgattcgtctctcttagtaactctagtaaaataatcatacaatctagtacgcgaaataatattatccttgacttgaggagatctaaacaatctagttttgagaacatcgataagttcatcgggaatgacatacatactatctttaatagaactcttttcatccagttgaatggattcgtccttaaccaactgattaatgagatcttctattttatcattttccagatgatatgtatgtccattaaagttaaattgtgtagcgcttctttttagtctagcagccaatactttaacatcactaatatcgatatacaaaggagatgatttatctatggtattaagaattcgtttttcgacatccgtcaaaaccaattcctttttgcctgtatcatccagttttccatcctttgtaaagaaattattttctactagactattaataagactgataaggattcctccataattgcacaatccaaactttttcacaaaactagactttacgagatctacaggaatgcgtacttcaggtttcttagcttgtgattttttcttttgcggacattttcttgtgaccaactcatctaccatttcattgattttagcagtgaaataagctttcaatgcacgggcactgatactattgaaaacgagttgatcttcaaattccgccatttaagttcaccaaacaacttttaaatacaaatatatcaatagtagtagaataagaactataaaaaaaataataattaaccaataccaaccccaacaaccggtattattagttgatgtgactgttttctcatcacttagaacagatttaacaatttctataaagtctgtcaaatcatcttccggagaccccataaatacaccaaatatagcggcgtacaacttatccatttatacattgaatattggcttttctttatcgctatcttcatcatattcatcatcaatatcaacaagtcccagattacgagccagatcttcttctacattttcagtcattgatacacgttcactatctccagagagtccgataacgttagccaccacttctctatcaatgattagtttcttgagtgcgaatgtaatttttgtttccgttccggatctatagaagacgataggtgtgataattgccttggccaattgtctttctcttttactgagtgattctagttcaccttctatagatctgagaatggatgattctccagccgaaacatattctaccatggctccgtttaatttgttgatgaagatggattcatccttaaatgttttctctgtaatagtttccaccgaaagactatgcaaagaatttggaatgcgttccttgtgcttaatgtttccatagacggcttctagaagttgatacaacataggactagccgcggtaacttttatttttagaaagtatccatcgcttctatcttgtttagatttatttttataaagtttagtctctccttccaacataataaaagtggaagtcatttgactagataaactatcagtaagttttatagagatagacgaacaattagcgtattgagaagcatttagtgtaacgtattcgatacattttgcattagatttactaatcgattttgcatactctataacacccgcacaagtctgtagagaatcgctagatgcagtaggtcttggtgaagtttcaactctcttcttgattaccttactcatgattaaacctaaataattgtactttgtaatataatgatatatattttcactttatctcatttgagaataaaaatgtttttgtttaaccactgcatgatgtacagatttcggaatcgcaaaccaccagtggttttattttatccttgtccaatgtgaattgaatgggagcggatgcgggtttcgtacgtagatagtacattcccgtttttagaccgagactccatccgtaaaaatgcatactcgttagtttggaataactcggatctgctatatggatattcatagattgactttgatcgatgaaggctcccctgtctgcagccatttttatgatcgtcttttgtggaatttcccaaatagttttataaactcgcttaatatcttctggaaggtttgtattctgaatggatccaccatctgccataatcctattcttgatctcatcattccataattttctctcggttaaaactctaaggagatgcggattaactacttgaaattctccagacaatactctccgagtgtaaatattactggtatacggttccaccgactcattatttcccaaaatttgagcagttgatgcagtcggcataggtgccaccaataaactatttctaagaccgtatgttctgattttatcttttagaggttcccaattccaaagatccgacggtacaacattccaaagatcatattgtagaataccgttactggcgtacgatcctacatatgtatcgtatggtccttccttctcagctagttcacaactcgcctctaatgcaccgtaataaatggtttcgaagatcttcttatttagatcttgtgcttccaggctatcaaatggataatttaagagaataaacgcgtccgctaatccttgaacaccaataccgataggtctatgtctcttattagagatttcagcttctggaataggataataattaatatctataattttattgagatttctgacaattactttgaccacatccttcagtttgagaaaatcaaatcgcccatctattacaaacatgttcaaggcaacagatgccagattacaaacggctacctcattagcatccgcatattgtattatctcagtgcaaagattactacacttgatagttcctaaattttgttgattactctttttgttacacgcatccttataaagaatgaatggagtaccagtttcaatctgagattctataatcgctttccagacgactcgagcctttattatagatttgtatctcctttctctttcgtatagtgtatacaatcgttcgaactcgtctccccaaacattgtccaatccaggacattcatccggacacatcaacgaccactctccgtcatccttcactcgtttcataaagagatcaggaatccaaagagctataaatagatctctggttctatgttcctcgtttcctgtattctttttaagatcgaggaacgccataatatcagaatgccacggttccaagtatatggccataactccaggccgtttgtttcctccctgatctatgtatctagcggtgttattataaactctcaacattggaataataccgtttgatataccattggtaccggagatatagcttccactggcacgaatattactaattgatagacctattccccctgccattttagagattaatgcgcatcgttttaacgtgtcatagataccctctatgctatcatcgatcatgttaagtaaaaaacagctagacatttggtgacgactagttcccgcattaaataaggtaggagaagcgtgcgtaaaccatttttcagaaagtagattgtacgtctcaatagctgagtctatatcccattgatgaattcctactgcgacacgcattaacatgtgctgaggtctttcaacgatcttgttgtttattttcaacaagtaggatttttccaaagttttaaaaccaaaatagttgtatgaaaagtctcgttcgtaaataataaccgagttgagtttatccttatatttgttaactatatccatggtgatacttgaaataatcggagaatgtttcccatttttaggattaacatagttgaataaatcctccatcacttcactaaatagtttttttgtttccttgtgtagatttgatacggctattctggcggctagaatggcataatccggatgttgtgtagtacaagtggctgctatttcggctgccagagtgtccaattctaccgttgttactccattatatattccttgaataaccttcatagctattttaataggatctatatgatccgtgtttaagccataacataattttctaatacgagacgtgattttatcaaacatgacattttccttgtatccatttcgtttaatgacaaacatttttgttggtgtaataaaaaaattatttaacttttcattaatagggatttgacgtatgtagcgtacaaaattatcgttcctggtatatagataaagagtcctatatatttgaaaatcgttacggctcgattaaactttaatgattgcatagtgaatatatcattaggatttaactccttgactatcatggcggcgccagaaattaccatcaaaagcattaatacagttatgccgatcgcagttagaacggttatagcatccaccatttatatctaaaaattagatcaaagaatatgtgacaaagtcctagttgtatactgagaattgacgaaacaatgtttcttacatatttttttcttattagtaactgacttaatagtaggaactggaaagctagacttgattattctataagtatagatacccttccagataatgttctctttgataaaagttccagaaaatgtagaattttttaaaaagttatcttttgctattaccaagattgtgtttagacgcttattattaatatgagtaatgaaatccacaccgcctctagatatcgcctttatttccacattagatggtaaatccaatagtgaaactatctttttaggaatgtatggactcgcgtttagaggagtgaacgtcttgggcgtcggaaaggatgattcgtcaaacgaataaacaatttcacaaatggatgttaatgtattagtaggaaatttcttgacgctagtggagttgaagattctaatggatgatgttctacctatttcatccgataacatgttaatttccgacaccaacggttttaatatttcgatgatatacggtagtctctctttcggacttatatagcttattccacaatacgagtcattatatactccaaaaaacaaaataactagtataaaatctgtatcgaatgggaaaaacgaaattatcgacataggtatagaatccggaacattgaacgtattaatacttaattctttttctgtggtaagtaccgataggttattgacattgtatggttttaaatattctataacttgagacttgatagatattagtgatgaattgaaaattatttttatcaccacgtgtgtttcaggatcatcgtcgacgcccgtcaaccaaccgaatggagtaaaataaatatcattaatatatgctctagatattagtatttttatcaatcctttgattatcatcttctcgtaggcgaatgattccatgatcaagagtgatttaagaacatcctccggagtattaatgggcttagtaaacagtccatcgttgcaataataaaagttatccaagttaaaggatattatgcattcgtttaaagatatcacctcatctgacggagacaattttttggtaggttttagagactttgaagctacttgtttaacaaagttattcatcgtcgtctactattctatttaattttgtagttaatttatcacatatcacattaattgactttttggtccatttttccatacgtttatattcttttaatcctgcgttatccgtttccgttatatccagtgatagatcgtgcaggttaaatagaatgctcttaaataatgtcatttttttatccgctaaaaatttaaagaatgtataaacctttttcagagatttgaaactcttaggtggtgtcctagtacacaatatcataaacaaactaataaacattccacattcagattccaacagctgattaacttccacattaatacagcctattttcgctccaaatgtacattcgaaaaatctgaataaaacatcgatgtcacaatttgtattatccaatacagaatgtctgtgattcgtgttaaaaccatcggagaaggaatagaaataaaaattattatagtggtggaattcagttggaatattgcctccggagtcataaaaggatactaaacattgttttttatcataaattacacatttccaatgagacaaataacaaaatccaaacattacaaatctagaggtagaacttttaattttgtctttaagtatatacgataagatatgtttattcataaacgcgtcaaatttttcatgaatcgctaaggagtttaagaatctcatgtcaaattgtcctatataatccacttcggatccataagcaaactgagagactaagttcttaatacttcgattgctcatccaggctcctctctcaggctctattttcatcttgacgacctttggattttcaccagtatgtattcctttacgtgataaatcatcgattttcaaatccatttgtgagaagtctatcgccttagatactttttcccgtagtcgaggtttaaaaaaatacgctaacggtatactagtaggtaactcaaagacatcatatatagaatggtaacgcgtctttaactcgtcggttaactctttcttttgatcgagttcgtcgctactattgggtctgctcaggtgccccgactctactagttccaacatcataccgataggaatacaagacactttgccggcggttgtagatttatcatatttctccactacatatccgttacaatttgttaaaaatttagatacatctatattgctacataatccagctagtgaatatatatgacataataaattggtaaatcctagttctggtattttactaattactaaatctgtatatctttccatttatcatggaaaagaatttaccagatatcttcttttttccaaactgcgttaatgtattctcttacaaatattcacaagatgaattcagtaatatgagtaaaacggaacgtgatagtttctcattggccgtgtttccagttataaaacatagatggcataacgcacacgttgtaaaacataaaggaatatacaaagttagtacagaagcacgtggaaaaaaagtatctcctccatcactaggaaaacccgcacacataaacctaaccacgaaacaatatatatacagtgaacacacaataagctttgaatgttatagttttctaaaatgtataacaaatacagaaatcaattcgttcgatgagtatatattaagaggactattagaagctggtaatagtttacagatattttccaattccgtaggtaaacgaacagatactataggtgtactagggaataagtatccatttagcaaaattccattggcctcattaactcctaaagcacaacgagagatattttcagcgtggatttctcatagacctgtagttttaactggaggaactggagtgggtaagacgtcacaggtacccaagttattgctttggtttaattatttatttggtggattctctactctagataaaatcactgactttcacgaaagaccagtcattctatctcttcctaggatagctttagttagattgcatagcaataccattttaaaatcattgggatttaaggtactagatggatctcctatttctttacggtacggatctataccggaagaattaataaacaaacaaccaaaaaaatatggaattgtattttctacccataagttatctctaacaaaactatttagttatggcactcttattatagacgaagttcatgagcatgatcaaataggagatattattatagcagtagcgagaaagcatcatacgaaaatagattctatgtttttaatgactgccacgttagaggatgacagggaacggctaaaagtatttttacctaatcccgcatttatacatattcctggagatacactgtttaaaattagcgaggtatttattcataataagataaatccatcttccagaatggcatacatagaagaagaaaagagaaatttagttactgctatacagatgtatactcctcctgatggatcatccggtatagtctttgtggcatccgttgcacagtgtcacgaatataaatcatatttagaaaaaagattaccgtatgatatgtatattattcatggtaaggtcttagatatagacgaaatattagaaaaagtgtattcatcacctaatgtatcgataattatttctactccttatttggaatccagcgttactatacgcaatgttacacacatttatgatatgggtagagtttttgtccccgctccttttggaggatcgcaagaatttatttctaaatctatgagagatcaacgaaaaggaagagtaggaagagttaatcctgggacatacgtatatttctatgatctgtcttatatgaagtctatacagcgaatagattcagaatttctacataattatatattgtacgctaataagtttaatctaacactccccgaagatttgtttataatccctacaaatttggatattctatggcgtacaaaggaatatatagactcgttcgatattagtacagaaacatggaataaattattatccaattattatatgaagatgatagagtatgctaaactttatgtactaagtcctattctcgctgaggagttggataactttgagaggacgggagaattaactagtattgtacgagaagccattttatctctaaatttacgaattaagattttaaattttaaacataaagatgatgatacgtatatacacttttgtaaaatattattcggtgtctataacggaacaaacgctactatatattatcatagacctctaacgggatatatgaatatgatttcagatactatatttgttcctgtagataataactaaaaatcaaactctaatgaccacatctttttttagagatgaaaaattttccacatctccttttgtagacacgactaaacattttgcagaaaaaagtttattagtgtttagataatcgtatacttcatcagtgtagatagtaaatgtgaacagataaaaggtattcttgctcaatagattggtaaattccatagaatatattaatcctttcttcttgagatcccacatcatttcaaccagagacgttttatccaatgatttacctcgtactataccacatacaaaactagattttgcagtgacgtcgtacctggtattcctaccaaacaaaattttacttttagttcttttagaaaattctaaggtagaatctctatttgccaatatgtcatctatggaattaccactagcaaaaaatgatagaaatatatattgatacatcgcagctggttttgatctactatactttaaaaacgaatcagattccataattgcctgtatatcatcagctgaaaaactatgttttacacgtattccttcggcatttctttttaatgatatatcttgtttagacaatgataaagttatcatgtccatgagagacgcgtctccgtatcgtataaatatttcattagatgttagacgcttcattaggggtatacttctataaggtttcttaatcagtccatcattggttgcgtcaagaactactatcggatgttgttgggtatctctagtgttacacatggccttactaaagtttgggtaaataactatgatatctctattaattatagatgcatatatttcattcgtcaaggatattagtatcgacttgctatcgtcattaatacgtgtaatgtaatcatataaatcatgcgatagccaaggaaaattcaaatagatgttcatcatataatcgtcgctataattcatattaatactttgacattgactaatttgtaatatagcctcgccacgaagaaagctctcgtattcagtttcatcgataaaggataccgttaaatataactggttgccgatagtctcatagtctattaagtggtaagtttcgtacaaatacagaatccctaaaatattatctaatgttggattaatctttaccataactgtataaaatggagacggagtcataactattttaccgtttgtacttactggaatagatgaaggaataatctccggacatgctggtaaagacccaaatgtctgtttgaagaaatccaatgttccaggtcctaatctcttaacaaaaattacgatattcgatcccgatatcctttgcattctatttaccagcatatcacgaactatattaagattatctatcatgtctattctcccaccgttatataaatcgcctccgctaagaaacgttagtatatccatacaatggaatacttcatttctaaaatagtattcgttttctaattctttaatgtgaaatcgtatactagaaagggaaaaattatctttgagttttccgttagaaaagaaccacgaaactaatgttctgattgcgtccgattccgttgctgaattaatggatttacaccaaaaactcatataacttctagatgtagaagcattcgctaaaaaattagtagaatcaaaggatataagtagatgttccaacaagtgagcaattcccaagatttcatctatatcattctcgaatccgaaattagaaattcccaagtagatatcctttttcatccgatcattgatgaaaatacgaactttattcggtaagacaatcatttactaaggagtaaaataggaagtaatgttcgtatgtcgttatcatcgtataaattaaaggtgtgttttttaccattaagtgacattataattttaccaatattggaattataatataggtgtatttgcgcactcgcgacggttgatgcatcggtaaatatagctgtatctaatgttctagtcggtatttcatcatttcgctgtctaataatagcgttttctctatctgtttccattacagctgcctgaagtttattggtcggataatatgtaaaataataagaaatacatacgaataacaaaaataaaataagatataataaagatgccatttagagatctaattttgttcaacttgtccaaattcctacttacagaagatgaggaatcgttggagatagtgtcttccttatgtagaggatttgaaatatcttatgatgacttgataacttactttccagataggaaataccataaatatatttctaaagtatttgaacatgtagatttatcggaggaattaagtatggaattccatgatacaactttgcgagatttagtttatcttagattgtacaagtattccaagtgtatacggccgtgttataaattaggagataatctaaaaggcatagttgttataaaggacaggaatatttatattagggaagcaaatgatgacttgatagaatatctcctcaaggaatacactcctcagatttatacatattctaatgagcgcgtccccataactggttcaaaattaattctttgtggattttctcaagttacatttatggcgtatacaacgtcgcatataacaacaaataaaaaggtagatgttctcgtttccaaaaaatgtatagatgaactagtcgatccaataaattatcaaatacttcaaaatttatttgataaaggaagcggaacaataaacaaaatactcaggaagatattttattcggtaacaggtggccaaactccataggtagctttttctatttcggattttagaatttccaaattcaccagcgatttatcggttttggtgaaatccaaggatttattaatgtccacaaatgccatttgttttgtctgtggattgtatttgaaaatggaaacgatgtagttagatagatgcgctgcgaagtttcctattagggttccgcgcttcacgtcacccagcatacttgaatcaccatcctttaaaaaaaatgataagatatcaacatggagtatatcatactcggattttaattcttctactgcatcactgacattttcacaaatactacaatacggtttaccgaaaataatcagtacgttcttcatttatgggtatcaaaaacttaaaatcgttactgctggaaaataaatcactgacgatattagatgataatttatacaaagtatacaatggaatatttgtggatacaatgagtatttatatagccgtcgccaattgtgtcagaaacttagaagagttaactacggtattcataaaatacgtaaacggatgggtaaaaaagggagggcatgtaaccctttttatcgatagaggaagtataaaaattaaacaagacgttagagacaagagacgtaaatattctaaattaaccaaggacagaaaaatgctagaattagaaaagtgtacatccgaaatacaaaatgttaccggatttatggaagaagaaataaaggcagaaatgcaattaaaaatcgataaactcacatttcaaatatatttatctgattctgataacataaaaatatcattgaatgagatactaacacatttcaacaataatgagaatgttacattattttattgtgatgaacgagacgcagaattcgttatgtgtctcgaggctaaaacacatttctctaccacaggagaatggccgttgataataagtaccgatcaggatactatgctatttgcatctactgataatcatcctaagatgataaaaaacttaactcaactgtttaaatttgttccctcggcagaggataactatttagcaaaattaacggcgttagtgaatggatgtgatttctttcctggactctatggggcatctataacacccaacaacttaaacaaaatacaattgtttagtgattttacaatcgataatatagtcactagtttggcaattaaaaattattatagaaagactaactctaccgtagacgtgcgtaatattgttacgtttataaacgattacgctaatttagacgatgtctactcgtatgttcctccttgtcaatgcactgttcaagaatttatattttccgcattagatgaaaaatggaacaattttaaatcatcttatttagagaccgttccgttaccctgtcaattaatgtacgcgttagaaccacgcaaggagattgatgtttcagaagttaaaactttatcatcttatatagatttcgaaaatactaaatcagatatcgatgttataaaatctatatcctcgatcttcggatattctaacgaaaactgtaacacgatagtattcggcatctataaggataatttactactgagtataaataattcattttactttaacgatagtctgttaataaccaatactaaaagtgataatataataaatataggttactagattaaaaatggtgttccaactcgtgtgctctacatgcggtaaagatatttctcacgaacgatataaattgattatacgaaaaaaatcattaaaggatgtactcgtcagtgtaaagaacgaatgttgtaggttaaaattatctacacaaatagaacctcaacgtaacttaacagtgcaacctctattggatataaactaatatggatccggttaattttatcaagacatatgcgcctagaggttctattatttttattaattataccatgtcattaacaagtcatttgaatccatcgatagaaaaacatgtgggtatttattatggtacgttattatcggaacacttggtagttgaatctacctatagaaaaggagttcgaatagtcccattggatagtttttttgaaggatatcttagtgcaaaagtatacatgttagagaatattcaagttatgaaaatagcagctgatacgtcattaactttattgggtattccgtatggatttggtcataatagaatgtattgttttaaattggtagctgactgttataaaaatgccggtgttgaaacatcgtctaaacgaatattaggtaaagatatttttctgagccaaaacttcacagacgataatagatggataaagatatatgattctaataatttaacattttggcaaattgattaccttaaagggtgagttaatatgcataactactcctccgttgttttttccctcgttctttttcttaacgttgtttgccatcactctcataatgtaaagatattctaaaatggtaaacttttgcatatcggacgcagaaattggtataaatgttgtaattgtattatttcccgtcaatggactagtcacagctccatcagttttatatcctttagagtatttctcactcgtgtctagcattctagagcattccatgatctgtttatcgttgatattggccggaaagatagattttttattttttattatattactattggcaattgtagatataacttctggtaaatatttttctaccttttcaatttcttctattttcaagccggctatatattctgctatattgttgctagtatcaataccttttctggctaagaagtcatatgtggtattcactatatcagttttaactggtagttccattagcctttccacttctgcagaataatcagaaattggttctttaccagaaaatccagctactataataggctcaccgatgatcattggcaaaatcctatattgtaccagattaatgagagcatatttcatttccaataattctgctagttcttgagacattgatttatttgatgaatctagttggttctctagatactctaccatttctgccgcatacaataacttgttagataaaatcagggttatcaaagtgtttagcgtggctagaatagtgggcttgcatgtattaaagaatgcggtagtatgagtaaaccgttttaacgaattatatagtctccagaaatctgtggcgttacatacatgagccgaatgacatcgaagattgtccaatatttttaatagctgctctttgtccattatttctatatttgactcgcaacaattgtagataccattaatcactgattcctttttcgatgccggacaatagcacaattgtttagctttggactctatgtattcagaattaatagatatatctcttaatacagattgcactatacattttgaaactatgtcaaaaattgtagaacgacgctgttctgcagccatttaactttaaataatttacaaaaatttaaaatgagcatccgtataaaaatcgataaactgcgccaaattgtggcatatttttcagagttcagtgaagaagtgtctataaatgtagactcgacggatgagttaatgtatatttttgccgccttgggcggatctgtaaacatttgggccattatacctctcagtgcatcagtgttctaccgaggagccgaaaacattgtgtttaatcttcctgtgtccaaggtaaaatcgtgtttgtgtagttttcacaatgatgccatcatagatatagaacctgatctggaaaataatctagtaaaactttctagttatcatgtagtaagtgtcgattgtaataaggaactgatgcctattaggacagatactactatttgtctaagtatagatcaaaagaaatcttatgtgtttaattttcacaagtatgaagaaaaatgttgtggtagaaccgtcattcatttagaatggttgttgggctttatcaagtgtattagtcagcatcagcatctggctattatgtttaaagatgacaatattattatgaagactcctggtaatactgatgcattttccagggaatattctatgactgaatgttctcaagaactacaaaagttttctttcaaaatagctatctcgtctctcaacaaactacgaggattcaaaaagagagtcaatgtttttgaaactagaatcgtaatggataatgacgataacattctaggaatgttgttttcggatagagttcaatcctttaagatcaacatctttatggcgtttttagattaatactttcaatgagataaatatgggtggcggagtaagtgttgagctccctaaacgggatccgcctccgggagtacccactgatgagatgttattaaacgtggataaaatgcatgacgtgatagctcccgctaagcttttagaatatgtgcatataggaccactagcaaaagataaagaggataaagtaaagaaaagatatccagagtttagattagtcaacacaggacccggtggtctttcggcattgttaagacaatcgtataatggaaccgcacccaattgctgtcgcacttttaatcgtactcattattggaaaaaggatggaaagatatcagataagtatgaagagggtgcagtattagaatcgtgttggccagacgttcacgacactggaaaatgcgatgttgatttattcgactggtgtcagggggatacgttcgatagaaacatatgccatcagtggatcggttcagcctttaataggagtaatagaactgtagagggtcaacaatcgttaataaatctgtataataagatgcaaacattatgtagtaaagatgctagtgtaccaatatgtgaatcatttttgcatcatttacgcgcacacaatacagaagatagcaaagagatgatcgattatattctaagacaacagtctgcggactttaaacagaaatatatgagatgtagttatcccactagagataagttagaagagtcattaaaatatgcggaacctcgagaatgttgggatccagagtgttcgaatgccaatgttaatttcttgctaacacgtaattataataatttaggactttgcaatattgtacgatgtaatactagcgtgaacaacttacagatggataaaacttcctcattaagattgtcatgtggattaagcaatagtgatagattttctactgttcccgtcaatagagcaaaagtagttcaacataatattaaacactcgttcgacctaaaattgcatttgatcagtttattatctctcttggtaatatggatactaattgtagctatttaaatgggtgccgcagcaagcatacagacgacggtgaatacactcagcgaacgtatctcgtctaaattagaacaagaagcgaatgctagtgctcaaacaaaatgtgatatagaaatcggaaatttttatatccgacaaaaccatggatgtaacctcactgttaaaaatatgtgctctgcggacgcggatgctcagttggatgctgtgttatcagccgctacagaaacatatagtggattaacaccggaacaaaaagcatacgtgccagctatgtttactgctgcgttaaacattcagacgagtgtaaacactgttgttagagattttgaaaattatgtaaaacaaacttgtaattctagcgcggtcgtcgataacaaattaaagatacaaaacgtaatcatagatgaatgttacggagccccaggatctccaacaaatttggaatttattaatacaggatctagcaaaggaaattgtgccattaaggcgttgatgcaattgactactaaggccactactcaaatagcacctagacaagttgctggtacaggagttcagttttatatgattgttatcggtgttataatattggcagcgttgtttatgtactatgccaagcgtatgctgttcacatccaccaatgataaaatcaaacttattttagccaataaggaaaacgtccattggactacttacatggacacattctttagaacttctccgatggttattgctaccacggatatgcaaaactgaaaatatattgataatattttaatagattaacatggaagttatcgctgatcgtctagacgatatagtgaaacaaaatatagcggatgaaaaatttgtagattttgttatacacggtctagagcatcaatgtcctgctatacttcgaccattaattaggttgtttattgatatactattatttgttatagtaatttatatttttacggtacgtctagtaagtagaaattatcaaatgttgttggcgttggtggcgctagtcatcacattaactattttttattactttatactataatagtactagactgacttctaacaaacatctcacctgccataaataaatgcttgatattaaagtcttctatttctaacactattccatctgtggaaaataatactctgacattatcgctaattgacacatcggtgagtgatatgcctataaagtaataatcttctttgggcacatataccagtgtaccaggttctaacaacctatttactggtgctcctgtagcatactttttctttaccttgagaatatccatcgtttgcttggtcaatagcgatatgtgattttttatcaaccactcgaaaaagtaattggagtgttcatatcctctacgggctattgtctcatggccgtgtatgaaatttaagtaacacgactgtggtagatttgttctatagagccggttgccgcaaatagatagaactaccaatatgtctgtacaaatgttaaacattaattgattaacagaaaaaacaatgttcgttctgggaatagaaaccagatcaaaacaaaattcgttagaatatatgccacgtttatacattgaatataaaataactacagtttgaaaaataacagtatcatttaaacatttaacttgcggggttaatttcacaactttactgtttttaaactgttcaaaatatagcatcgatccatgagaaatacgtttagccgcctttaatagaggaaatcccaccgcctttctggatctcaccaacgacgatagttctgaccagcaactcatttcttcatcatccacctgttttaacatataataggcaggagatagatatccgtcattgcaatattccttttcgtaggcacacaatctaatattgataaaatctccattctcttctctgcatttattatcttgtttcggtggctgattaggctgtagtcttggtttaggccttggtctatcgttgttgaatctattttggtcattaaatctttcatttcttcctggtatatttctatcacctcgtttggttggatttttgtctatattatcgtttgtaacatcggtacgggtattcatttatcacaaaaaaaacttctctaaatgagtctactgctagaaaacctcatcgaagaagataccatattttttgcaggaagtatatctgagtatgatgatttacaaatggttattgccggcgcaaaatccaaatttccaagatctatgctttctatttttaatatagtacctagaacgatgtcaaaatatgagttggagttgattcataacgaaaatatcacaggagcaatgtttaccacaatgtataatataagaaacaatttgggtctaggagatgataaactaactattgaagccattgaaaactatttcttggatcctaacaatgaagttatgcctcttattattaataatacggatatgactgccgtcattcctaaaaaaagtggtaggagaaagaataagaacatggttatcttccgtcaaggatcatcacctatcttgtgcattttcgaaactcgtaaaaagattaatatttataaagaaaatatggaatccgcatcgactgagtatacacctatcggagacaacaaggctttgatatctaaatatgcgggaattaatgtcctgaatgtgtattctccttccacatccatgagattgaatgccatttacggattcaccaataaaaataaactagagaaacttagtactaataaggaactagaatcgtatagttctagccctcttcaagaacccattaggttaaatgattttctgggactattggaatgtgttaaaaagaatattcctctaacagatattccgacaaaggattgattactataaatggagaatgttcctaatgtatactttaatcctgtgtttatagagcccacgtttaaacattctttattaagtgtttataaacacagattaatagttttatttgaagtattcgttgtattcattctaatatatgtattttttagatctgaattaaatatgttcttcatgcctaaacgaaaaatacccgatcctattgatagattacgacgtgctaatctagcgtgtgaagacgataaattaatgatctatggattaccatggatgacaactcaaacatctgcgttatcaataaatagtaaaccgatagtgtataaagattgtgcaaagcttttgcgatcaataaatggatcacaaccagtatctcttaacgatgttcttcgcagatgatgattcattttttaagtatttggctagtcaagatgatgaatcttcattatctgatatattgcaaatcactcaatatctagactttctgttattattattgatccaatcaaaaaataaattagaagccgtgggtcattgttatgaatctctttcagaggaatacagacaattgacaaaattcacagactctcaagattttaaaaaactgtttaacaaggtccctattgttacagatggaagggtcaaacttaataaaggatatttgttcgactttgtgattagtttgatgcgattcaaaaaagaatcctctctagctaccaccgcaatagatcctattagatacatagatcctcgtcgcgatatcgcattttctaacgtgatggatatattaaagtcgaataaagtgaacaataattaattctttattgtcatcatgaacggcggacatattcagttgataatcggccccatgttttcaggtaaaagtacagaattaattagacgagttagacgttatcaaatagctcaatataaatgcgtgactataaaatattctaacgataatagatacggaacgggactatggacgcatgataagaataattttgaagcattggaagcaactaaactatgtgatgtcttggaatcaattacagatttctccgtgataggtatcgatgaaggacagttctttccagacattgttgaattctgtgagcgtatggcaaacgaaggaaaaatagttatagtagccgcactcgatgggacatttcaacgtaaaccgtttaataatattttgaatcttattccattatctgaaatggtggtaaaactaactgctgtgtgtatgaaatgctttaaggaggcttccttttctaaacgattgggtgaggaaaccgagatagaaataataggaggtaatgatatgtatcaatcggtgtgtagaaagtgttacatcgactcataatattatattttttatctaaaaaactaaaaataaacattgattaaattttaatataatacttaaaaatggatgttgtgtcgttagataaaccgtttatgtattttgaggaaattgataatgagttagattacgaaccagaaagtgcaaatgaggtcgcaaaaaaactgccgtatcaaggacagttaaaactattactaggagaattattttttcttagtaagttacagcgacacggtatattagatggtgccaccgtagtgtatataggatcggctcctggtacacatatacgttatttgagagatcatttctataatttaggaatgattatcaaatggatgctaattgacggacgccatcatgatcctattctaaatggattgcgtgatgtgactctagtgactcggttcgttgatgaggaatatctacgatccatcaaaaaacaactgcatccttctaagattattttaatttctgatgtaagatccaaacgaggaggaaatgaacctagtacggcggatttactaagtaattacgctctacaaaatgtcatgattagtattttaaaccccgtggcatctagtcttaaatggagatgcccgtttccagatcaatggatcaaggacttttatatcccacacggtaataaaatgttacaaccttttgctccttcatattcagctgaaatgagattattaagtatttataccggtgagaacatgagactgactcgagttaccaaatcagacgctgtaaattatgaaaaaaagatgtactaccttaataagatcgtccgtaacaaagtagttgttaactttgattatcctaatcaggaatatgactattttcacatgtactttatgctgaggaccgtgtactgcaataaaacatttcctactactaaagcaaaggtactatttctacaacaatctatatttcgtttcttaaatattccaacaacatcaactgaaaaagttagtcatgaaccaatacaacgtaaaatatctagcaaaaattctatgtctaaaaacagaaatagcaagagatccgtacgcggtaataaatagaaacgtactactgagatatactaccgatatagagtataatgatttagttactttaataaccgttagacataaaattgattctatgaaaactgtgtttcaggtatttaacgaatcatccataaattatactccggttgatgatgattatggagaaccaatcattataacatcgtatcttcaaaaaggtcataacaagtttcctgtaaattttctatacatagatgtggtaatatctgacttatttcctagctttgttagactagatactacagaaactaatatagttaatagtgtactacaaacaggcgatggtaaaaagactcttcgtcttcccaaaatgttagagacggaaatagttgtcaagattctctatcgccctaatataccattaaaaattgttagatttttccgcaataacatggtaactggagtagagatagccgatagatctgttatttcagtcgctgattaatcaattagtagagatgagataagaacattataataatcaataatatatcttatatcttatatcttatatcttgtttagaaaaatgctaatattaaaatagctaacgctagtaatccaatcggaagccatttgatatctataatagggtatctaatttcctgatttaaatagcggacagctatattctcggtagctactcgtttggaatcacaaacattatttacatctaatttactatctgtaatggaaacgtttcccaatgaaatggtacaatccgatacattgcattttgttatatttttttttaaagaggctggtaacaacgcatcgcttcgtttacatggctcgtaccaacaataatagggtaatcttgtatctattcctatccgtactatgcttttatcaggataaatacatttacatcgtatatcgtctttgttagcatcacagaatgcataaatttgttcgtccgtcatgataaaaatttaaagtgtaaatataactattatttttatagttgtaataaaaagggaaatttgattgtatactttcggttctttaaaagaaactgacttgataaaaatggctgtaatctctaaggttacgtatagtctatatgatcaaaaagagattaatgctacagatattatcattagtcatgttaaaaatgacgacgatatcggtaccgttaaagatggtagactaggtgctatggatggggcattatgtaagacttgtgggaaaacggaattggaatgtttcggtcactggggtaaagtaagtatttataaaactcatatagttaagcctgaatttatttcagaaattattcgtttactgaatcatatatgtattcactgcggattattgcgttcacgagaaccgtattccgacgatattaacctaaaagagttatcgggacacgctcttaggagattaaaggataaaatattatccaagaaaaagtcatgttggaacagcgaatgtatgcaaccgtatcaaaaaattactttttcaaagaaaaaggtttgtttcgtcaacaagttggatgatattaacgttcctaattctctcatctatcaaaagttaatttctattcatgaaaagttttggccattattagaaattcatcaatatccagctaacttattttatacagactactttcccatccctccgctgattattagaccggctattagtttttggatagatagtatacccaaagagaccaatgaattaacttacttattaggtatgatcgttaagaattgtaacttgaatgctgatgaacaggttatccagaaggcggtaatagaatacgatgatattaaaattatttctaataacacttccagtatcaatttatcatatattacatccggcaaaaataatatgattagaagttatattgtcgcccgacgaaaagatcagaccgctagatctgtaattggtcccagtacatctatcaccgttaatgaggtaggaatgcccgcatatattagaaatacacttacagaaaagatatttgttaatgcctttacagtggataaagttaaacaactattagcgtcaaaccaagttaaattttactttaataaacgattaaaccaattaacaagaatacgccaaggaaagtttattaaaaataaaatacatttattgcctggtgattgggtagaagtagctgttcaagaatatacaagtattatttttggaagacagccgtctctacatagatacaacgtcatcgcttcatctatcagagctaccgaaggagatactatcaaaatatctcccggaattgccaactctcaaaatgctgatttcgacggagatgaagaatggatgatattggagcaaaatcctaaagccgtaattgaacaaagtattcttatgtatccgacgacgttactcaaacacgatattcatggagcccccgtttatggatctattcaagatgaaatcgtagcagcgtattcattgtttagaatacaagatctttgtttagatgaagtattgaacatcttggggaaatatggaagaaagttcgatcctaaaggtaaatgtaaattcagcggtaaagatatctatacttacttgataggtgaaaagattaattatccgggtctcttaaaggatggtgaaattattgcaaacgacgtagatagtaattttgttgtggctatgaggcatctgtcattggctggactcttatccgatcataagtcgaacgtggaaggtatcaactttattatcaagtcatcttatgtttttaagagatatctatctatttacggttttggggtgacattcaaagatctgagaccaaattcgacgttcactaataaattggaggccatcaacgtagaaaaaatagaacttatcaaagaagcatacgccaaatatctcaacgatgtaagagacgggaaaatagttccattatctaaagctttagaggcggactatgtggaatccatgttatccaacttgacaaatcttaatatccgagagatagaagaacatatgagacaaacgctgatagatgatccagataataacctcctgaaaatggccaaagcgggttataaagtaaatcccacagaactaatgtatattctaggtacttatggacaacagaggattgatggtgaaccagcagagactcgagtattgggtagagtcttaccttactatcttccagactctaaggatccagaaggaagaggttatattcttaattctttaacaaaaggattaacaggttctcaatattacttttcgatgctggttgccagatctcaatctactgatatcgtctgtgaaacatcacgtaccggaacactggctagaaaaatcattaaaaagatggaggatatggtggtcgacggatacggacaagtagttataggtaatacgctcatcaagtacgccgccaattataccaaaattctaggctcagtatgtaaacctgtagatcttatctatccagatgagtccatgacttggtatttggaaattagtgctctgtggaataaaataaaacagggattcgtttactctcagaaacagaaacttgcaaaaaagacattggcgccgtttaatttcctagtattcgtcaaacccaccactgaggataatgctattaaggttaaggatctgtacgatatgattcataacgtcattgatgatgtgagagagaaatacttctttacggtatctaatatagattttatggagtatatattcttgacgcatcttaatccttctagaattagaattacaaaagaaacggctatcactatctttgaaaagttctatgaaaaactcaattatactctaggtggtggaactcctattggaattatttctgcacaggtattgtctgagaagtttacacaacaagccctgtccagttttcacactactgaaaaaagtggtgccgtcaaacaaaaacttggtttcaacgagtttaataacctgactaatttgagtaagaataagaccgaaattatcactctggtatccgatgatatctctaaacttcaatctgttaagattaatttcgaatttgtatgtttgggagaattaaatccaaacatcactcttcgaaaagaaacagataggtatgtagtagatataatagtcaatagattatacatcaagagagcagaaattaccgaattagtcgtcgaatatatgattgaacgatttatctcctttagcgtcattgtaaaggaatggggtatggagacattcattgaggacgaggataatattagatttactgtctacctaaatttcgttgaaccggaagaattgaatcttagtaagtttatgatggttcttccgggtgccgccaacaagggcaagattagtaaattcaagattcctatctctgactatacgggatatgacgacttcaatcaaacaaaaaagctcaataagatgactgtagaactcatgaatctaaaagaattgggttctttcgatttggaaaacgtcaacgtgtatcctggagtatggaatacatacgatatcttcggtatcgaggccgctcgtgaatacttgtgcgaagccatgttaaacacctatggagaagggttcgattatctgtatcagccttgtgatcttctcgctagtttactatgtgctagttacgaaccagaatcagtgaataaattcaagttcggcgcagctagtactcttaagagagctacgttcggagacaataaagcattgttaaacgcggctcttcataaaaagtcagaacctattaacgataatagtagctgccacttttttagcaaggtccctaatataggaactggatattacaaatactttatcgacttgggtcttctcatgagaatggaaaggaaactatctgataagatatcttctcaaaagatcaaggaaatggaagaaacagaagacttttaattcttatcaataacatatttttctatgatctgtcttttaaacgatggattttccacaaatgcgcctctcaagtccctcatagaatgatacacgtataaaaaatatagcataggcgatgactccttatttttagacattagatatgccaaaatcatagccccgcttctatttactcccgcagcacaatgaaccaacacgggctcgtttcgttgatcacatttagataaaaaggcggtcacgtcgtcaaaatatttactaatatcggtagttgtatcatctaccaacggtatatgaataatattaatattagagttaggcaatgtatatttatccatcgtcaaatttaaaacatatttgaacttaacttcagatgatggtgcatccatagcatttttataatttcccaaatacacattattggttacccttgtcattatagtgggagatttggctttgtgcatatctccagttgaacgtagtagtaagtatttatacaaacttttcttatccatttataacgtacaaatggataaaactactttatcggtaaacgcgtgtaatttagaatacgttagagaaaaggctatagtaggcgtacaagcagccaaaacatcaacacttatattctttgttattatattggcaattagtgcgctattactctggtttcagacgtctgataatccagtctttaatgaattaacgagatatatgcgaattaaaaatacggttaacgattggaaatcattaacggatagcaaaacaaaattagaaagtgatagaggtaaacttctagccgctggtaaggatgatatattcgaattcaaatgtgtggatttcggcgcctattttatagctatgcgattggataagaaaacatatctgccgcaagctattaggcgaggtactggagacgcgtggatggttaaaaaggcggcaaaggtcgatccatctgctcaacaattttgtcagtatttgataaaacacaagtctaataatgttattacttgtggtaatgagatgttaaatgaattaggttatagcggttattttatgtcaccgcattggtgttccgattttagtaatatggaatagtgttagataaatgcggtaacaaatgttcctgtaaggaaccataacagcttagatttaacgttaaagatgagcataaacataataaacaaaattacaatcaaacctataacattaatatcaaacaatccaaaaaatgaaatcagtggagtagtaaacgcgtacataactcctggataacgtttagcagctgccgttcctattctagaccaaaaattcggtttcatgttttcgaagcggtgttctgcaacaagtcggggatcgtgttctacatatttggcggcattatccagtatctgcctattgatcttcatttcgttttcgattctggctatttcaaaataaaatcccgatgatagacctccagactttataatttcatctacgatgttcagcgccgtagtaactctaataatataggctgataagctaacatcataccctcctgtatatgtgaatatggtatgatttttgtccattacaagctcggttttaactttattgcctgtaataatttctctcatctgtaggatatctatttttttgtcatgcattgccttcaagacgggacgaagaaacgtaatatcctcaataacgttatcgttttctacaataactacatattctacctttttattttctaactcggtaaaaaaattagaatcccatagggctaaatgtctagcgatatttcttttcgtttcctctgtacacatagtgttacaaaaccctgaaaagaagtgagtatacttgtcatcatttctaatgtttcctccagtccactgtataaacgcataatccttgtaatgatctggatcatccttgactaccacaacatttcttttttctggcataacttcgttgtcctttacatcatcgaacttctgatcattaatatgctcatgaacattaggaaatgtttctgatggaggtctatcaataactggcacaacaataacaggagttttcaccgccgccatttagttattgaaattaatcatatacaactctttaatacgagttatattttcgtctatccattgtttcacatttacatatttcgacaaaaagatataaaatgcgtattccaatgcttctctgtttaatgaattactaaaatatacaaacacgtcactgtctggcaataaatgatatcttagaatattgtaacaatttattttgtattgcacatgttcgtgatctatgagttcttcttcgaatggcataggatctccgaatctgaaaacgtataaataggagttagaataataatatttgagagtattggtaatatataaactctttagcggtataattagtttttttctctcaatttctatttttagatgtgatggaaaaatgactaattttgtagcattagtatcatgaactctaatcaaaatcttaatatcttcgtcacacgttagctctttgaagtttttaagagatgcatcagttggttctacagatggagtaggtgcaacaattttttgttctacacatgtatgtactggagccattgttttaactataatggtgcttgtatcgaaaaactttaatgcagatagcggaagctcttcgccgcgactttctacatcgtaattgggttctaacgccgatctctgaatggatactagttttctaagttctaatgtgattctctgaaaatgtaaatccaattcctccggcattatagatgtgtatacatcggtaaataaaactatagtatccaacgatcccttctcgcaaattctagtcttaaccaaaaaatcgtatataaccacggagatggcgtatttaagagtggattcttctaccgttttgttcttggatgtcatataggaaactataaagtccgcactactgttaagaatgattactaacgcaactatatagttcaaattaagcattttggaaacataaaataactctgtagacgatacttgactttcgaataagtttgcagacaaacgaagaaagaacagacctctcttaatttcagaagaaaactttttttcgtattcctgacgtctagagtttatatcaataagaaagttaagaattagtcggttaatgttgtatttcattacccaagtttgagatttcataatattatcaaaagacatgataatattaaagataaagcgctgactatgaacgaaatagctatatggttcgctcaaaaatatagtcttgttaaacgtggaaacgataactgtatttttaatcacgtcagcggcatctaaattaaatataggtatatttattccacacactctacaatatgccacaccatcttcataataaataaattcgttagcaaaattattaattttagtgaaatagttagcgtcaactttcatagcttccttcaatctaatttgatgctcacacggtgcgaattctactctaacatcccttttccatgcctcaggttcatcgatctctataatatctagttttttgcgtttcacaaacacaggctcgtctctcgcgatgagatctgtatagtaactatgtaaatgataactagatagaaagatgtagctatatagatgacgatcctttaagagaggtataataactttaccccaatcagatagactgttgttatggtcttcggaaaaagaatttttataaatttttccagtattttccaaatatacgtacttaacatctaaaaaatccttaatgataataggaatggataatccgtctattttataaagaaatacatatcgcacattatacttttttttggaaatgggaataccgatgtgtctacataaatatgcaaagtctaaatattttttagagaatcttagttggtccaaattcttttccaagtacggtaatagatttttcatattgaacggtatcttcttaatctctggttctagttccgcattaaatgatgaaactaagtcactatttttataactaacgattacatcacctctaacatcatcatttaccagaatactgatcttcttttgtcgtaaatacatgtctaatgtgttaaaaaaaagatcatacaagttatacgtcatttcatctgtggtattcttgtcattgaaggataaactcgtactaatctcttctttaacagcctgttcaaatttatatcctatatacgaaaaaatagcaaccagtgtttgatcatccgcgtcaatattctgttctatcgtagtgtataacaatcgtatatcttcttctgtgatagtcgatacgttataaaggttgataacgaaaatatttttatttcgtgaaataaagtcatcgtaggattttggacttatattcgcgtctagtagatatgcttttatttttggaatgatctcaattagaatagtctctttagagtccatttaaagttacaaacaactaggaaattggtttatgatgtataatttttttagtttttatagattctttattctatacttaaaaaatgaaaataaatacaaaggttcttgagggttgtgttaaattgaaagcgagaaataatcataaattatttcattatcgcgatatccgttaagtttgtatcgtaatggcgtggtcaattacaaataaagcggatactagtagcttcacaaagatggctgaaatcagagctcatctaaaaaatagcgctgaaaataaagataaaaacgaggatattttcccggaagatgtaataattccatctactaagcccaaaaccaaacgagccactactcctcgtaaaccagcggctactaaaagatcaaccaaaaaggaggaagtggaagaagaagtagttatagaggaatatcatcaaacaactgaaaaaaattctccatctcctggagtcggcgacattgtagaaagcgtggctgctgtagagctcgatgatagcgacggggatgatgaacctatggtacaagttgaagctggtaaagtaaatcatagtgctagaagcgatctttctgacctaaaggtggctaccgacaatatcgttaaagatcttaagaaaattattactagaatctctgcagtatcgacggttctagaggatgttcaagcagctggtatctctagacaatttacttctatgactaaagctattacaacactatctgatctagtcaccgagggaaaatctaaagttgttcgtaaaaaagttaaaacttgtaagaagtaaatgcgtgcacttttttataaagatggtaaactctttaccgataataattttttaaatcctgtatcagacgataatccagcgtatgaggttttgcaacatgttaaaattcctactcatttaacagatgtagtagtatatgaacaaacgtgggaagaggcattaactagattaatttttgtgggaagcgattcaaaaggacgtagacaatacttttacggaaaaatgcatgtacagaatcgcaacgctaaaagagatcgtatttttgttagagtatataacgttatgaaacgaattaattgttttataaacaaaaatataaagaaatcgtccacagattccaattatcagttggcggtttttatgttaatggaaactatgttttttattagatttggtaaaatgaaatatcttaaggagaatgaaacagtagggttattaacactaaaaaataaacacatagaaataagtcccgatgaaatagttatcaagtttgtaggaaaggacaaagtttcacatgaatttgttgttcataagtctaatagactatataaaccgctattgaaactgacggatgattctagtcccgaagaatttctgttcaacaaactaagtgaacgaaaggtatacgaatgtatcaaacagtttggtattagaatcaaggatctccgaacgtatggagtcaattatacgtttttatataatttttggacaaatgtaaagtccatatctcctcttccgtcaccaaaaaagttaatagcgttaactatcaaacaaactgctgaagtggtaggtcatactccatcaatttcaaaaagagcttacatggcaacgactattttagaaatggtaaaggataaaaattttttagatgtagtatctaaaactacgttcgatgaattcctatctatagtcgtagatcacgttaaatcatctacggatggatgatatagatctttacacaaataattacaagaccgataaatggaaatggataagcgtataaaatctctcgcaatgacagctttcttcggagagctaaacacattagatattatggcattgataatgtctatatttaaacgccatccaaacaataccattttttcagtggataaggatggtcagtttatgattgatttcgaatacgataattataaggcttctcaatatttggatctgaccctcactccgatatctggagatgaatgcaagactcacgcatcgagtatagccgaacaattggcgtgtgcggatattattaaagaggatattagcgaatatatcaaaactactccccgtcttaaacgatttataaaaaaataccgcaatagatcagatactcgcatcagtcgagatacagaaaagcttaaaatagctctagctaaaggcatagattacgaatatataaaagacgcttgttaataagtaaatgaaaaaaaactagtcgtttataataaaacacgatatggatgccaacgtagtatcatcttctactattgcaacgtatatagacgctttagcgaagaatgcttcagaattagaacagaggtctaccgcatacgaaataaataatgaattggaactagtatttattaagccgccattaattactttgacaaatgtagtgaatatctctacgattcaggaatcgtttattcgatttaccgttactaataaggaaggtgttaaaattagaactaagattccattatctaaggtacatggtctagatgtaaaaaatgtacagttagtagatgctatagataacatagtttgggaaaagaaatcattagtgacggaaaatcgtcttcacaaagaatgcttgttgagactatcgacagaggaacgtcatatatttttggattacaagaaatatggatcctctatccgactagaattagtcaatcttattcaagcaaaaacaaaaaactttacgatagactttaagctaaaatattttctaggatccggtgcccagtctaaaagttctttattacacgctattaatcatccaaagtcaaggcctaatacatctctggaaatagaattcacacctagagacaatgaaaaagttccatatgatgaactaataaaggaattgacgactctatcacgtcatatatttatggcttctccagagaatgtaattctttctccgcctattaacgcacctataaagacttttatgttgcctaaacaagatatagtaggtctggatctggaaaatctatacgctgtaactaagactgacggcattcctataactatcagagttacatcaaacgggttgtattgttattttacacatcttggttatattattagatatcctgttaagagaataatagattccgaagtagtagtctttggtgaggcagttaaggataagaactggaccgtatatctcattaagctaatagagcctgtgaatgcaatcaatgatagactagaagaaagtaagtatgttgaatctaaactagtggatatttgtgatcggatagtattcaagtcaaagaaatacgaaggtccgtttactacaactagtgaagtcgtcgatatgttatctacatatttaccaaagcaaccagaaggtgttattctgttctattcaaagggacctaaatctaacattgattttaaaattaaaaaggaaaatactatagaccaaactgcaaatgtagtatttaggtacatgtccagtgaaccaattatctttggagaatcgtctatctttgtagagtataagaaatttagcaacgataaaggctttcctaaagaatatggttctggtaagattgtgttatataacggcgttaattatctaaataatatctattgtttggaatatattaatacacataatgaagtgggtattaagtccgtggttgtacctattaagtttatagcagaattcttagttaatggagaaatacttaaacctagaatcgataaaaccatgaaatatattaactcagaagattattatggaaatcaacataatatcatagtcgaacatttaagagatcaaagcatcaaaataggagatatctttaacgaggataaactatcggatgtgggacatcaatacgccaataatgataaatttagattaaatccagaagttagttattttacgaataaacgaactagaggaccgttgggaattttatcaaactacgtcaagactcttcttatttctatgtattgttccaaaacatttttagacgattccaacaaacgaaaggtattggcgattgattttggaaacggtgctgacctggaaaaatacttttatggagagattgcgttattggtagcgacggatccggatgctgatgctatagctagaggaaatgaaagatacaacaaattaaactctggaattaaaaccaagtactacaaatttgactacattcaggaaactattcgatccgatacatttgtctctagtgtcagagaagtattctattttggaaagtttaatatcatcgactggcagtttgctatccattattcttttcatccgagacattatgctaccgtcatgaataacttatccgaactaactgcttctggaggcaaggtattaatcactaccatggacggagacaaattatcaaaattaacagataaaaagacttttataattcataagaatttacctagtagcgaaaactatatgtctgtagaaaaaatagctgatgatagaatagtggtatataatccatcaacaatgtctactccaatgactgaatacattatcaaaaagaacgatatagtcagagtgtttaacgaatacggatttgttcttgtagataacgttgatttcgctacaattatagaacgaagtaaaaagtttattaatggcgcatctacaatggaagatagaccgtctacaaaaaactttttcgaactaaatagaggagccattaaatgtgaaggtttagatgtcgaagacttacttagttactatgttgtttatgtcttttctaagcggtaaataataatatggtatgggttctgatatccccgttctaaatgcattaaataattccaatagagcgatttttgttcctataggaccttccaactgtggatactctgtattgttaatagatatattaatacttttgtcgggtaacagaggttctacgtcttctaaaaataaaagtttgataacatctggcctgttcataaataaaaacttggcgattctatatatactcttattatcaaatctagccattgtcttatagatgtgagctactgtaggtgtaccatttgattttctttctaatactatatatttctctcgaagaagttcttgcacatcatctgggaataaaatactactgttgagtaaatcagttattttttttatatcgatattgatggacatttttatagttaaggataataagtatcccaaagtcgataacgacgataacgaagtatttatacttttaggaaatcacaatgactttatcagattaaaattaacaaaattaaaggagcatgtatttttttctgaatatattgtgactccagatacatatggatctttatgcgtcgaattaaatgggtctagttttcagcacggtggtagatatatagaggtggaggaatttatagatgctggaagacaagttagatggtgttctacatccaatcatatatctgaagatatacccgaagatatacacactgataaatttgtcatttatgatatatacacttttgacgctttcaagaataaacgattggtattcgtacaggtacctccgtcgttaggagatgatagtcatttgactaatccgttattgtctccgtattatcgtaattcagtagccagacaaatggtcaatgatatgatttttaatcaagattcatttttaaaatatttattagaacatctgattagaagccactatagagtttctaaacatataacaatagttagatacaaggataccgaagaattaaatctaacgagaatatgttataatagagataagtttaaggcgtttgtattcgcttggtttaacggcgtttcggaaaatgaaaaggtactagatacgtataaaaaggtatctaatttgatataatgaattcagtgactgtatcacacgcgccatatactattacttatcacgatgattgggaaccagttatgagtcaattggtagagttttataacgaagtagccagttggctgctacgagacgagacgtcgcctattcctgataagttctttatacagttgaaacaaccgcttagaaataaacgagtatgtgtgtgtggtatagatccgtatccgaaagatggaactggtgtaccgttcgaatcaccaaattttacaaaaaaatcaattaaggagatagcttcatctatatctagattaaccggagtaattgattataaaggttataaccttaatataatagacggggttataccctggaattattacttaagttgtaaattaggagaaacaaaaagtcacgcgatctactgggataagatttccaagttactgctgcagcatataactaaacacgttagtgttctttattgtttgggtaaaacagatttctcgaatatacgggcaaagttagaatccccggtaactaccatagtgggatatcatccagcggctagagaccgccaattcgagaaagatagatcatttgaaattatcaacgttttactggaattagacaacaaggtacctataaattgggctcaagggtttatttattaatgctttagtgaaattttaacttgtgttctaaatggatgcggctattagaggtaatgatgttatctttgtccttaagactataggtgtcccatcagcatgtagacaaaatgaagatccaagattcgtagaagcatttaaatgcgacgagttaaaaagatatattgataataatccagaatgtacactattcgaaagtcttagggatgaggaagcatactctatagtcagaattttcatggatgtagatttagacgcgtgtctagacgaaatagattatttaacggctattcaagattttattatcgaggtgtcaaactgtgtagctagattcgcgtttacagaatgcggtgccattcatgaaaatgtaataaaatccatgagatctaatttttcattgactaagtctacaaatagagataaaacaagttttcatattatctttttagacacgtataccactatggatacattgatagctatgaaacgaacactattagaattaagtagatcatctgaaaatccactaacaagatcgatagacactgccgtatataggagaaaaacaactcttcgggttgtaggtactaggaaaaatccaaattgcgacactattcatgtaatgcaaccaccgcatgataatatagaagattacctattcacttacgtggatatgaacaacaatagttattacttttctctacaacgacgattggaggatttagttcctgataagttatgggaaccagggtttatttcattcgaagacgctataaaaagagtttcaaaaatattcattaattctataataaactttaatgatctcgatgaaaataattttacaacggtaccactggtcatagattacgtaacaccttgtgcattatgtaaaaaacgatcgcataaacatccgcatcaactatcgttggaaaatggtgctattagaatttacaaaactggtaatccacatagttgtaaagttaaaattgttccgttggatggtaataaactgtttaatattgcacaaagaattttagacactaactctgttttattaaccgaacgaggagactatatagtttggattaataattcatggaaatttaacagcgaagaacccttgataacaaaactaattctgtcaataagacatcaactacctaaggaatattcaagcgaattactctgtccgaggaaacgaaagactgtagaagctaacatacgagacatgttagtagattcagtagagaccgatacctatccggataaacttccgtttaaaaatggtgtattggacctggtagacggaatgttttactctggagatgatgctaaaaaatatacgtgtactgtatcaaccggatttaaatttgacgatacaaagttcgtcgaagacagtccagaaatggaagagttaatgaatatcattaacgatatccaaccattaacggatgaaaataagaaaaatagagagctatatgaaaaaacattatctagttgtttatgtggtgctaccaaaggatgtttaacattcttttttggagaaactgcaactggaaagtcgacaaccaaacgtttgttaaagtctgctatcggtgacctgtttgttgagacgggtcaaacaattttaacagatgtattggataaaggacctaatccatttatcgctaacatgcatttgaaaagatctgtattctgtagcgaactacctgattttgcctgtagtggatcaaagaaaattagatctgataatattaaaaagttgacagaaccttgtgtcattggaagaccgtgtttctccaataaaattaataatagaaaccatgctacaatcattatcgatactaattacaaacctgtctttgataggatagataacgcattaatgagaagaattgccgtcgtgcgattcagaacacacttttctcaaccttctggtagagaggctgctgaaaataatgacgcgtacgataaagtcaaactattagacgaggggttagatggtaaaatacaaaataatagatatagatttgcatttctatacttgttggtgaaatggtacaaaaaatatcatgttcctattatgaaactatatcctacacccgaagagattcctgactttgcattctatctcaaaataggtactctgttagtatctagctctgtaaagcatattccattaatgacggacctctccaaaaagggatatatattgtacgataatgtggttactcttccgttgactactttccaacagaaaatatccaagtattttaattctagactatttggacacgatatagagagcttcatcaatagacataagaaatttgccaatgttagtgatgaatatctgcaatatatattcatagaggatatttcatctccgtaaatatatgctcatatatttatagaagatatcacatatctaaatgaataccggaattatagatttatttgataatcatgttgatagtataccaactatattacctcatcagttagctactctagattatctagttagaactatcatagatgagaacagaagcgtgttattgttccatattatgggatcaggtaaaacaataatcgctttgttgttcgccttggtagcttccagatttaaaaaggtttacattctagtgccgaacatcaacatcttaaaaattttcaattataatatgggtgtagctatgaacttgtttaatgacgaattcatagctgagaatatctttattcattccacaacaagtttttattctcttaattataacgataacgtcattaattataacggattatctcgctacaataactctatttttatcgttgatgaggcacataatatctttgggaataatactggagaacttatgaccgtgataaaaaataaaaacaagattccttttctactattgtctggatctcccattactaacacacctaatactctgggtcatattatagatttaatgtccgaagagacgatagattttggtgaaattattagtcgtggtaagaaagtaattcagacacttcttaacgaacgaggtgtgaatgtacttaaggatttgcttaaaggaagaatatcatattacgaaatgcctgataaagatctaccaacgataagatatcacggacgtaagtttctagatactagagtagtatattgtcacatgtctaaacttcaagagagagattatatgattactagacgacagctatgttatcatgaaatgtttgataaaaatatgtataacgtgtcaatggcagtattgggacaacttaatctgatgaataatttagatactttatttcaggaacaggataaggaattgtacccaaatctgaaaataaataatggcgtgttatacggagaagaattggtaacgttaaacattagttccaaatttaagtactttatcaatcggatacagacactcaacggaaaacattttatatacttttctaattctacatatggtggattggtaattaaatatatcatgctcagtaatggatattctgaatataatggttctcagggaactaatccacatatgataaacggcaaaccaaaaacatttgctatcgttactagtaaaatgaaatcgtctttagaggatctattagatgtgtataattctcctgaaaacgatgatggtagtcaattgatgtttttgttttcatcaaacattatgtccgaatcctatactctgaaagaggtaaggcatatttggtttatgactatcccagatactttttctcaatacaaccaaattcttggacgatctattagaaaattctcttacgccgatatttctgaaccagttaatgtatatcttttagccgccgtatattccgatttcaatgacgaagtaacgtcattaaacgattacacacaggatgaattaattaatgttttaccatttgacatcaaaaagctgttgtatctaaaatttaagacgaaagaaacgaatagaatatactctattcttcaagagatgtctgaaacgtattctcttccaccacatccatcaattgtaaaagttttattgggagaattggtcagacaatttttttataataattctcgtattaagtataacgactccaagttacttaaaatggttacatcagttataaaaaataaagaagacgctaggaattacatagatgatattgtaaacggtcacttctttgtatcgaataaagtatttgataaatctcttttatacaaatacgaaaacgatattattacagtaccgtttagactttcctacgaaccatttgtttggggagttaactttcgtaaagaatataacgtggtatcttctccataaaactgatgagatatataaagaaataaatgtcgagctttgttaccaatggatacctttccgttacattggaacctcatgagctgacgttagacataaaaactaatattaggaatgccgtatataagacgtatctccatagagaaattagtggtaaaatggccaagaaaatagaaattcgtgaagacgtggaattacctctcggcgaaatagttaataattctgtagttataaacgttccgtgtgtaataacctacgcgtattatcacgttggggatatagtcagaggaacattaaacatcgaagatgaatcaaatgtaactattcaatgtggagatttaatctgtaaactaagtagagattcgggtactgtatcatttagcgattcaaagtactgcttttttcgaaatggtaatgcgtatgacaatggcagcgaagtcactgccgttctaatggaggctcaacaaggtatcgaatctagttttgtttttctcgcgaatatcgtcgactcataagaaagagaatagcggtaagtataaacacgaatactatggcaataattgcgaatgttttattcccttcgatatatttttgataatatgaaaaacatgtctctctcaaatcggacaaccatctcataaaatagttctcgcgcgctggagaggtagttgctgctcgtataatctccccagaataatatacttgcgtgtcgtcgttcaatttatacggatttctatagttctctgttatataatacggttttccatcatgattagacgacgacaatagtgttctaaatttagatagttgatcagaatgaatgtttattggcgttggaaaaattatccatacagcgtctgcagagtgcttgatagttgttcctagatatgtaaaataatccaacgtactaggtagcaaattgtctagataaaatactgaatcaaacggcgcagacgtattagcggatctaatggaatccaattgattgactatcttttgaaaatatacatttttatgatccgatacttgtaagaatatagaaataatgataagtccatcatcgtgtttttttgcctcttcataagaactatattttttcttattccaatgaacaagattaatctctccagagtatttgtacacatctatcaagtgattggatccataatcgtcttcctttccccaatatatatgtagtgatgataacacatattcattggggagaaaccctccacttatatatcctcctttaaaattaatccttactagttttccagtgttctggatagtggttggtttcgactcattataatgtatgtctaacggcttcaatcgcgcgttagaaattgcttttttagtttctatattaataggagatagttgttgcggcatagtaaaaatgaaatgataactgtttaaaaatagctcttagtatgggaattacaatggatgaggaagtgatatttgaaactcctagagaattaatatctattaaacgaataaaagatattccaagatcaaaagacacgcatgtgtttgctgcgtgtataacaagtgacggatatccgttaataggagctagaagaacttcattcgcgttccaggcgatattatctcaacaaaattcagattctatctttagagtatccactaaactattacggtttatgtactacaatgaactaagagaaatctttagacggttgagaaaaggttctatcaacaatatcgatcctcacttcgaagagttaatattattgggtggtaaactagataaaaaggaatctattaaagattgtttaagaagagaattaaaagaggaaagtgatgaacgtataacagtaaaagaatttggaaatgtaattctaaaacttacaacacgggataaattatttaataaagtatatataagttattgcatggcgtgttttattaatcaatcgttggaggatttatcgcatactagtatttacaatgtagaaattagaaagattaaatcattaaatgattgtattaacgacgataaatacgaatatctgtcttatatttataatatgctagttaatagtaaatgaacttttacagatctagtataattagtcagattattaagtataatagacgactagctaagtctattatttgcgaggatgactctcaaattattacactcacggcattcgttaaccaatgcctatggtgtcataaacgagtatccgtgtccgctattttattaactactgataacaaaatattagtatgtaacagacgagatagttttctctattctgaaataattagaactagaaacatgtttagaaagaaacgattatttctgaattattccaattatttgtccaaacaggaaagaagtatactatcgtcatttttttctctatatccagctactgctgataatgatagaatagatgctatttatccgggtggcatacccaaaaggggtgagaatgttccagagtgtttatccagggaaattaaagaagaagttaatatagacaattcttttgtattcatagacactcggttttttattcatggcatcatagaagataccattattaataaattttttgaggtaatcttctttgtcggaagaatatctctaacgagtgatcaaatcattgatacatttaaaagtaatcatgaaatcaaggatctaatatttttagatccgaattcaggtaatggactccaatacgaaattgcaaaatatgctctagatactgcaaaactcaaatgttatggccatagaggatgttattacgaatcattaaaaaaattaactgaggatgattgattagaaaatataaattaatttaccatcgtgtatttttataacgggattgtccggcatatcatgtagatagttaccgtctacatcgtatactcgaccatctacgcctttaaatcctctatttattgacattaatctattagaattggaataccaaatattagtaccctcaattagtttattggtaatattttttttagacgatagatcgatggctcttgaaaccaaggttttccaaccggactcattgtcgatcggtgagaagtctttttcattagcatgaatccattctaatgatgtatgtttaaacactctaaacaattggacaaattcttttgatttgctttgaatgatttcaaataggtcttcgtctacagtaggcataccattagataatctagccattataaagtgcacgtttacatatctacgttctggaggagtaagaacgtgactattgagacgaatggctcttcctactatctgacgaagagacgcctcgttccaagtcatatctagaatgaagatatcattgattgagaagaagctaataccctcgcctccactagaagagaatacgcatgttttaatgcattctccgttagtgtttgattcttggttaaactcagccaccgccttgattctagtatcttttgttctagatgagaactctatattagagataccaaagactttgaaatatagtaataagatttctattcctgactgattaacaaatggttcaaagactagacatttaccatgggatgctaatattcccaaacatacatctataaatttgacgcttttctcttttaattcagtaaatagagagatatcagccgcactagcatcccctttcaatagttctccctttttaaaggtatctaatgcggatttagaaaactctctatttcttaatgaatttttaaaatcattatatagtgttgctatctcttgcgcgtattcgcccggatcacgattttgtctttcaggaaagctatcgaacgtaaacgtagtagccatacgtctcagaattctaaatgatgatatacctgtttttatttcagcgagtttagccttttgataaatttcttcttgctttttcgacatattaacgtatcgcattaatactgttttcttagcgaatgatgcagacccttctacgtcatcaaaaatagaaaactcgttattaactatgtacgaacataggcctcctagtttggagactaattctttctcatcaactagacgtttattctcaaatagcgattggtgttgtaaggatcctggtcgtagtaagttaaccaacatggtgaattcttgcacactattgacgataggtgtagccgataaacaaatcatcttatggttttttaacgcaatggttttagataaaaaattatatactgaacgagtaggacggatcttaccatcttctttgattaatgatttagaaatgaagttatgacattcatcaataatgacgcatattctactcttggaattaatagttttgatattagtaaaaaatttatttctaaaattttgatcatcgtaattaataaaaatacaatccttcgttatctctggagcgtatctgagtatagtgttcatccaaggatcttctatcaaagcctttttcaccaataagataatagcccaattcgtataaatatccttaagatgtttgagaatatatacagtagtcattgttttaccgacacccgtttcatggaacaataaaagagaatgcatactgtctaatcctaagaaaactcttgctacaaaatgttgataatccttgaggcgtactacgtccgaccccatcatttcaacaggcatattagtagttctgcgcaatgcataatcgatataggccgcgtgtgatttactcatttatgagtgataagtaataactatgttttaaaaatcacagcagtagtttaactagtcttctctgatgtttgttttcgatacttttcgaatcagaagtcatactagaataaagcagcgagtgaacgtaatagagagcttcgtatactctattcgaaaactctaagaacttattaatgaattccgtatccactggatcgtttaaaatactaaattgaacactgttcacatccttccaagaagaagacttagtgacggacttaacatgagacataaataaatccaaattttttttacaaacatcactagccaccataatggcgctatctttcaaccagctatcgcttacgcattttagcagtctaacatttttaaagagactacaatatattctcatagtatcgattacacctctaccgaataaagttggaagtttaataatacaatatttttcgtttacaaaatcaaataatggtcgaaacacgtcgaaggttaacatcttataatcgctaatgtatagattgttttcagtgagatgattattagatttaatagcatctcgttcacgtttgaacagtttattgcgtgcgctgaggtcggcaactacggcgtccgctttagtactcctcccataatactttacgctattaatctttaaaatttcatagactttatctagatcgctttctggtaacatgatatcatgtgtaaaaagttttaacatgtcggtcggcattctatttagatcattaactctagaaatctgaagaaagtaattagctccgtattccagactaggtaatgggcttttacctagagacagattaagttctggcaatgtttcataaaatggaagaaggacatgcgttccctcccggatattttttacaatttcatccatttacaactctatagtttgttttcattattattagttattatctcccataatcttggtaatacttaccccttgatcgtaagataccttatacaggtcattacatacaactaccaattgtttttgtacataatagattggatggttgacatccatggtggaataaactactcgaacagatagtttatctttccccctagatacattggccgtaatagttgtcggcctaaagaatatctttggtgtaaagttaaaagttagggttcttgttccattattgctttttgtcagtagttcattataaattctcgagatgggtccgttctctgaatatagaacatcatttccaaatctaacttctagtctagaaataatatcggtcttattcttaaaatctattcccttgatgaagggatcgttaatgaacaaatccttggcctttgattcggctgatctattatctccgttatagacgttacgttgactagtccaaagacttacaggaatagatgtatcgatgatgttgatactatgtgatatgtgagcaaagattgttctcttagtggcatcactatatgttccagtaatggcggaaaactttttagaaatgttatatataaaagaattttttcgtgttccaaacattagcagattagtatgaagataaacactcatattatcaggaacattatcaatttttacatacacatcagcatcttgaatagaaacgataccatcttctggaacctctacgatctcggcagactccggataaccagtcggtgggccatcactaacaataactagatcatccaacaatctactcacatatgcatctatataatctttttcatcttgtgagtaccctggatacgaaataaatttattatccgtatttccataataaggtttagtataaacagagagcgatgttgccgcatgaacttcagttacagtcgccgttggttggtttatttgacctattactctcctaggtttctctataaacgatggtttaatttgtacattcttaaccatatatccaataaagctcaattcaggaacataaacaaattctttgttgaacgtttcaaagtcgaacgaagagtcacgaataacgatatcggatactggattgaaggttaccgttacggtaatttttgaatcggatagtttaagactgctgaatgtatcttccacatcaaacggagttttaatataaacgtatactgtagatggttctttaatagtgtcattaggagttaggccaatagaaatatcattaagttcactagaatatccagagtgtttcaaagcaattgtattattgatacaattattatataattcttcgccctcaatttcccaaataacaccgttacacgaagagatagatacgtgattaatacatttatatccaacatatggtacgtaaccgaatcttcccatacctttaacttctggaagttccaaactcagaaccaaatgattaagcgcagtaatatactgatccctaatttcgaagctagcgatagcctgattgtctggaccatcgtttgtcataactccggatagagaaatatattgcggcatatataaagttggaatttgactatcgactgcgaagacattagaccgtttaatagagtcatccccaccgatcaaagaattaatgatagtattattcattttctatttaaaatggaaaaagcttacaataaactccgtagagaaatatctataatttgtgagttttccttaaagtaacagcttccgtaaacgccgtctttatctcttagtaagtttattgtatttataaccttttccttatcttcatagaatactaaaggcaacaaagaaatttttggttcttctctaagagctacgtgagacttaaccatagaagccaacgaatccctacatattttagaacagaaataccctacttcaccacccttgtatgtctcaatactaataggtctaaaaaccaaatcttgattacaaaaccaacacttatcaattacactatttgtcttaatagacacatctgccatagatttataatactttggtagtatacaagcgagtgcttcttctttagcgggcttaaagactgctttaggtgctgaaataaccacatctggaaggcttactcgcttagccatttaattacggaactatttttttatacttctaatgagcaagtagaaaacctctcatctacaaaaacgtactcgtgtccataatcctctaccatagtaacacgttttttagatctcatatgtgctaaaaagttttcccatactaattggttactattatttttcgtataatttttaacagtttgaggttttagatttttagttacagaagtgatatcgaatattttatccaaaaagaatgagtaattaattgtcttagaaggagtgttttcttggcaaaagaataccaagtgcttaaatatttctactacttcattaatcttttctgtactcagattcagtttctcatcttttacttgattgattatttcaaagactaacttataatcctttttatttattctctcgttagccttaagaaaactagatacaaaatttgcatctacatcatccgtggatatttgatttttttccatgatatccaagagttccgagataatttctccagaacattgatgagacaataatctccgcaatacatttctcaaatgaataagtttattagacacgtggaagtttgactttttttgtacctttgtacatttttgaaataccgactcgcaaaaaatacaatattcatatccttgttcagatactataccgttgtgtctacaaccgctacataatcgtagattcatgttaacactctacgtatctcgtcgtccaatattttatataaaaacattttatttctagacgttgccagaaaatcctgtaatatttttagttttttgggctgtgaataaagtatcgccctaatatggttaccgtcctccgccaatatagtagttaaattatccgcacatgcagaagaacaccgcttaggcggattcagtacaatgttatatttttcgtaccaactcatttaaatatcataatctaaaatagttctgtaatatgtctagcgctaatatattgatcataatcctgtgcataaattaagatacaacaatgtctcgaaatcatcgacatggcttcttccatagttagaagatcgtcgtcaaagttagcaacgtgattcatcaacatttgctgttttgaggcagcaaatactgaaccatcgccattcaaccattcataaaaaccatcgtctgaatccattgataatttcttgtactggtttttgagagctcgcatcaatctagcatttctagctcccggattgaaaacagaaagaggatcgtacatccagggtccattttctgtaaatagaatcgtataatgtcccttcaagaagatatcagacgatccacaatcaaagaattggtctccgagtttgtaacaaactgcggactttaacctatacatgataccgtttagcataatttctggtgatacgtcaatcggagtatcatctattagagatctaaagccggtgtaacattctccaccaaacatattcttattctgacgtcgttctacataaaacatcattgctccattaacgataacaggggaatgaacagcactacccatcacattagttcccaatggatcaatgtgtgtaactccagaacatcttccatatcctatgttaggaggagcgaacaccactcttccactattgccatcgaatgccatagaataaatatccttggaattgatagaaatcggactgtcggatgttgtgatcatcttcataggattaacaacgatgtatggtgccgcctgaagtttcatatcgtaactgatgccgtttataggtctagccacagaaaccaacgtaggtctaaatccaactatagacaaaatagaagccaatatctgttcctcatctgtcataacttgagagcatccagtatgaataatcttcattagatggggatctaccgcatcatcatcgttacaataaaaaattcccattctaatgttcataattgcttttctaatcatggtatgcatgtttgctctctgaatctctgtggaaattagatctgatacacctgtaatcactatcggattatcctccgtaagacgattaaccaacaacatataattataagactttacttttctaaattcataaagttgctggattaggctataggtgtctccatgtacatacgcgttctcgagcgcaggaagtttaataccgaatagtgccatcagaataggatgaatatagtaattagtttctggttttctataaataaaagacaaatcttgtgaactagacatatcggtaaaatgcatggattggaatcgtgtagtcgacagaagaatatgatgattagatggagagtatattttatctaactctttgagttggtcaccgattctaggactagctcgagaatgaataagtactaaaggatgagtacatttcacagaaacactagcattgttcaatgtgctctttacatgggtaaggagttgaaatagctcgtttctatttgttctgacaatatttagtttattcataatgttaagcatatcctgaatagtaaagttagatgtgtcatacttgttagtagttagatatttagcaattgcattcccatcatttctcaatctcgtactccaatcatgtgtagatgctacttcatctatagaaaccatacaatcctttttgataggctgttgagattgattatttcctgcacgtttaggtttggtacgttgatttctagcccctgcggatataaagtcatcgtctacaatttgggacaatgaattgcatacactacaagacaaagatttatcagaagtgtgaatatgatcttcatctaccaaagaaagagtttgattagtataactagattttagtcctgcgttagatgttaaaaaaacatcgctattgaccacggcttccattatttatattcgtagtttttactcgaaagcgtgattttaatatccaatcttattacttttggaatcgttcaaaacctttgactagttgtagaatttgatctattgccctacgcgtatactcccttgcatcatatacgttcgtcaccagatcgtttgtttcggcctgaagttggtgcatatctttttcaacactcgacatgagatccttaagggccatatcgtctagattttgttgagatgctgctcctggatttggattttgttgtgctgttgtacatactgtaccaccagtaggtgtaggagtacatacagtggccacaataggaggttgaggaggtgtaaccgttggagtagtacaagaaatatttccatccgattgttgtgtacatgtagttgttggtaacgtctgagaaggttgggtagatggcggcgtcgtcgttttttgatctttattaaatttagagataatatcctgaacagcattgctcggcgtcaacgctggaaggagtgaactcgccggcgcatcagtatcttcagacagccaatcaaaaagattagacatatcagatgatgtattagtttgttgtcgtggttttggtgtaggagcagtactactaggtagaagaataggagccggtgtagctgttggaaccggctgtggagttatatgaatagttggttgtagcggttggataggctgtctgctggcggccatcatattatctctagctagttgttctcgcaactgtctttgataatacgactcttgagactttagtcctatttcaatcgcttcatcctttttcgtatccggatccttttcttcagaataatagattgacgactttggtgtagaggattctgccagcccctgtgagaacttgttaaagaagtccatttaaggctttaaaattgaattgcgattataagattaaatggcagacacagacgatattatcgactatgaatccgatgatctcactgaatacgaggatgatgaagaagaggaagaagatggagagtcactagaaactagtgatatagatcccaaatcttcttataagattgtagaatcagcatccactcatatagaagatgcgcattccaatcttaaacatatagggaatcatatatctgctcttaaacgacgctatactagacgtataagtctatttgaaatagcgggtataatagcagaaagctataacttgcttcaacgaggaagattacctctagtttcagaattttctgacgaaacgatgaagcaaaatatgctacatgtaattatacaagagatagaggagggttcttgtcctatagtcatcgaaaagaacggagaattgttgtcggtaaacgattttgacaaagatggtctaaaattccatctagactatattatcaaaatttggaaacttcaaaaacgatattagaatttatacgaatatcgttctctaaatgtcacaatcaagtctcgcatgttcagcaatttattgtcgtactttatatcgtgttcattaacgatatcttgcaaaatagtaatgattctatcttccttcgatagatattcttcagagattattgtcttatattctttcttgttatcagatatgaatttgataagactttgaacattattgatacccgtctgtttaattttttctacagatattttagttttggcagattctatcgtatctgtcaatagacatccaacatcgacattcgacgtcaattgtctataaatcaacgtataaattttagaaataacattagcgaattgttgtgcattgatgtcgttattctgaaacagtatgattttaggtagcattttcttaacaaagagaacgtatttattgttactcagttgaacagatgatatatccagattactaacgcatctgattccgtataccaaactttcagaagaaatggtatacaattgtttgtattcattcaatgtctctttttcagaaattagtttagagtcgaatactgcaataattttcaagagatagttttcatcagataagattttatttagtgtagatatgataaaactattgttttgttggagaacttgatacgccgcgttctctgtagtcgacgctctcaaatgggaaacaatctccattatttttttggaatcggatacaatatcttcggtatcttgacgcagtctagtatacatagagttaagagagattagagtttgtacattaagcaacatgtctctaaatgtggctacaaacttttccttttccacatcatctagtttattatataccgatttcacaacggcaccagatttaaggaaccagaatgaaaaactctgataactacaatatttcatcatagttacgattttatcatcttctatagttggtgtgatagcgcatacctttttctccaagactggaaccaacgtcataaaaatgtttaaatcaaaatccatatcaacatctgatgcgctaagaccagtctcgcgttcaagattatctttactaatggtgacgaactcatcgtataaaactctaagtttgtccattatttatttacagatttagttgtttaatttatttgtgctcttccagagttgggatagtatttttctaacgtcggtattatattattaggatctacgttcatatgtatcataatattaatcatccacgttttgataaatctatctttagcttctgaaataacgtatttaaacaaaggagaaaaatatttagctacggcatcagacgcaataacattttttgtaaatgtaacatatttagacgacagatcttcgttaaaaagttttccatctatgtagaatccatcagttgttaacaccattcccgcgtcagattgaataggagtttgaatagtttgttttggaaatagatccttcaataacttatagttgggtgggaaaaaatcgattttatcactagactctttcttttttactatcattacctcatgaactatttcttgaatgagtatatgtattttctttcctatatcggacgcgttcattggaaaatataccatgtcgttaactataagaatatttttatcctcgtttacaaactgaataatatcagatgtagttcgtaaacgaactatatcatcaccagcacaacatctaactatatgatatccactagtttcctttagtcgtttattatcttgttccatattagcagtcattccatcatttaagaaggcgtcaaagataatagggagaaatgacattttggattctgttacaactttaccaaaattaaggatatacggacttactatctttttctcaacgtcaatttgatgaacacacgatgaaaatgtacttcgatgagattgatcatgtagaaaacaacaagggatacaatatttccgcatatcatgaaatatattaagaaatcccaccttattatatttccccaaaggatccatgcacgtaaacattatgccgttatcattaataaagacttctttctcatcggatctgtaaaagttgttactgatttttttcattccaggatctagataattaataatgatgggttttctattcttattctttgtattttggcatatcctagaccagtaaacagtttccactttggtaaaatcagcagacttttgaacgctattaaacatggcattaatggcaataactaaaaatgtaaaatatttttctatgttaggaatatggtttttcactttaatagatatatggtttttggccaaaatgatagatatttttttatccgaggatagtaaaatattattagtcgccgtctctataaaaatgaagctagtctcgatatccaattttattctagaattgataggagtcgccaaatgtaccttatacgttatatctcccttgatgcgttccatttgtgtatctatatcggacacaagatctgtaaatagttttacgttattaatcatcacggtatcgccgtcgctagataatgctaatgtaccatccaagtcccaaatggagagatttaactgttcatcgtttagaataaaatgattaccggtcatattaataaagtgttcatcgtatctagataacaacgacttataattaatgtccaagtcttgaactcgctgaatgatcttttttaacccagttagttttagattggtacgaaatatattgttaaactttgattctacagtaatgtccaaatctagttgtggaaatacttccatcaacattgtttcaaacttgataatattattatctacatcttcgtacgatccaaattccggaatagatgtatcgcacgctctgaccacccagataaccaaaaagtcacacgctccaggatatacattgtataaaaagctatcgttttttagtagtgtttttttctgagtatatacgaagggattaaaaatagtattatcaacgtaactatattccaaattattcttatgagaatagataataatatcgtccttaatatctaacaaatttcctaaatatccctttaattgagtcattcgaagcgtcaatagaatatgtctcttaactatttccggctgttgtatatttaaatgacttcgtaaaaaataatatatgggcgacttctcatctatgtaatcatatggagtgagatatagggctcgttctacctcctgccccttacccacctgtaataccaattgcggacttactatatatcgcatatttatatcgtggggtaaagtgaaaatctactaccgatgatgtaagtcttacaatgttcgaaccagtaccagatcttaatttggaggcctccgtagaactaggggaggtaaatatagatcaaacaacacctatgataaaggagaatagcggttttatatcccgcagtagacgtctattcgcccatagatctaaggatgatgagagaaaactagcactacgattctttttacaaagactttattttttagatcatagagagattcattatttgttcagatgcgttgacgctgtaaaagacgtcactattaccaaaaaaaataacattatcgtggcgccttatatagcacttttaactatcgcatcaaaaggatgcaaacttacagaaacaatgattgaagcattctttccagaactatataatgaacatagtaagaaatttaaattcaactctcaagtatccatcatccaagaaaaactcggataccagtttggaaactatcacgtttatgattttgaaccgtattactctacagtagctctggctattcgagatgaacattcatctggcatttttaatatccgtcaagagagttatctggtaagttcattatctgaaataacatatagattttatctaattaatctaaaatctgatcttgttcaatggagtgctagtacgggcgctgtaattaatcaaatggtaaatactgtattgattacagtgtatgaaaagttacaactggtcatagaaaatgattcacaatttacatgttcattggctgtggaatcagaacttccaataaaattacttaaagatagaaatgaattatttacaaaattcattaacgagttaaaaaagaccagttcattcaagataagcaaacgcgataaggatacgctattaaaatattttacttaggactggagttagaatttatagacgactcatttcgtttatcattattactaccatcattattagtattcttcttgtcatcttgttcagaaatatacagcaatgctatacctaatactaaatacattatcatgctcgcaatggctctaacaacaacgaaccaaaatgaatttggtcgtagcttttgttcacaaaaatacataaagaaatgtctacataaatctatggcgccattggctacttgaaatagcgccagtcctcctacagattttaatatagctgtataacatgacatttattcatcatcaaaagagacagagtcaccatctgtcatatttagattttttttcatgtgttcaaagtatcctctactcatttcattataatagtttatcatacttagaattttaggacggatcaatgagtaagacttgactagatcgtcagtagtaatttgtgcatcgtctattctgcatccgcttcgtcgaataatgtatagcatcgctttgagattctccatagctatcaagtctttatacaatgacatggaaatatctgtgaatactttatacttctccaacatcgatgccttaacatcatcgcctactttagcattgaaaatacgttctattgtgtagatggatgtagcaagatttttaaacaacaatgccattttacacgatgattgcctcaagtctccaatcgtttgtttagaacgattagctacagagttcaacgcttggctgactagcatattattatctttagaaattgtattcttcaatgaggcgtttatcatatctgtgatttcgttagtcatattacagtctgactgggttgtaatgttatccaacatatcacctatggatacggtacacgtaccagcatttgtaataatcctatctaagatgttgtatggcattgcgcagaaaatatcttctcctgtaatatctccactctcgataaatctactcagattattcttaaatgccttattctctggagaaaagatatcagtgtccatcatttcattaatagtatacgcagaaaagataccacgagtatcaattctatccaagatacttatcggttccgagtcacagataatggtttcctctccttcgggagatcctgcatagaaatatctaggacaatagtttctatactgtctgtaactctgataatctctaaagtcactaactgataccatgaaattgagaagatcaaacgctgaagtaattaatttttctgcctcgtttttactacaactagttttcatcaatgtagtgacgatgtattgtttagttactcttggtctaatactgatgatagagatattattacttcccataatggatcttctagtagtcaccttaaagcccattgatgcaaatagcagatagataaagtcttggtatgactcctttctaatatagtacggactacctttgtcacccaactttatacccacataagccataacaacctctttaatagccgtttcatgaggtttatcagccatgagcctgagtagttggaagaatctcatgaatcccgtctcagaaagtcctatatgcatgatagatttatctttcctgggaaactctcgtatagtcatagatgaaatactcttcaaagtttctgaaataagattagtaacagtcttacctccgactactctaggtaacaaacaaactctaataggtgttttctctgcggagataatatcagaaaggatagagcaataagtagtattattgtgattataaagaccgaatacataacaggtagaatttataaacatcatgtcctgaaggtttttagacttgtattcctcgtaatccataccgtcccaaaacatggatttggtaactttgatagccgtagatctttgttccttcgccaacaggttaaagaaattaataaagaatttgttgtttctatttatgtccacaaattgcacgtttggaagcgccacggttacattcactgcagcattttgaggatcgcgagtatgaagtacgatgttattgtttactggtatatctggaaagaaatctaccagtctaggaataagagattgatatcgcatagaaatacaaaagttcataatctcatcatcgaagagcattttgttaccattgtaataaatatccactctgtcatatgtataaatgaagtactgttcaaacatgatgagatgtttatatgttggcatagtagtgagatcgacgtttggtaatggcaatgtattaagattaactccataatgtctagcagcatctgcgatgttataagtgttgtcaaagcggggtcgatcttgtgctgttatatattgtctaacacctataagattatcaaaatcttgtctgcttaatacaccgttaacaatttttgccttgaattcttttattggtgcattaataacatccttatagaggatgttaaacaaataagtattatcaaagttaagatctgggtatttcttttctgctagaacatccattgagtcggagccatctggtttaatataaccaccgataaatctagctctgtattctgtatccgtcaatctaatattaagaaggtgttgagtgaaaggtggaagatcgtaaaagctgtgagtattaatgataggattagtttccgaactaatgttaattggggtattaataatatctatatttccagcgttaagtgtaacattaaacagttttaattcacgtgacgtggtatcaattaaataattaatgcccaatttggatatagcagcctgaagctcatcttgtttagttacggatcctaatgagttattaagcaatatatcgaacggatgaacgaaggttgttttgagtttgtcgcatactttgtaatctagacatagatgcggaagaacggtagaaactatacgaaataaatattcagagtcctctaattgatcaagagtaactattgacttaataggcatcatttatttagtattaaatgacgaccgtaccagtgacggatatacaaaacgatttaattacagagttttcagaagataattatccatctaacaaaaattatgaaataactcttcgtcaaatgtctattctaactcacgttaacaacgtggtagatagagaacataatgccgccgtagtgtcatctccagaggaaatatcctcacaacttaatgaagatctatttccagatgatgattctccggccactattatcgaaagagtacaacctcatactactattattgacgatactccacctcctacgtttcgtagagagttattgatatcggaacaacgtcaacaacgagaaaaaagatttaatattacagtatcgaaaaatgctgaagcaataatggaatctagatctatgatatcttctatgccaacacaaacaccatccttgggagtagtttatgataaagataaaagaattcagatgttggaggatgaagtggttaatcttagaaatcaacgatctaatacaaaatcatctgataatttagataattttaccagaatactatttggtaagactccgtataaatcaacagaagttaataagcgtatagccatcgttaattatgcaaatttgaacgggtctcccttatcagtcgaggacttggatgtttgttcagaggatgaaatagatagaatctataaaacgattaaacaatatcacgaaagtagaaaacgaaaaattatcgtcactaacgtgattattattgtcataaacattatcgagcaagcattgctaaaactcggatttgaagaaatcaaaggactgagtaccgatatcacttcagaaattatcgatgtggagatcggagatgactgcgatgctgtagcatctaaactaggaatcggtaacagtccggttcttaatattgtattgtttatactcaagatattcgttaaacgaattaaaattatttaatttaatacattcccatatccagacaacaatcgtctggattaatctgttcctgtcgtctcataccggacgacatattaatctttttattagtaggcatctttttagatggtttctttttcccagcattaactgagtcgatacctagaagatcgtgattgatctctccgaccattccacgaacttctaattggccgtctctgacggtaccataaactattttaccagcattagtaacagcttggacaatctgaccatccatcgcattgtacgatgtagtagtaactgttgttctacgtctaggagcaccagaagtatttttggagcccttggaggttgatgtagaagaagacgaggattttgattttggtttacatgtaatacattttgaactctttgattttgtatcacatgcgccggcagtcacatctgtttgagaattaagattattgttgcctcctttgacggctgcatctccaccgatttgcgctagtagatttttaagctgtggtgtaatcttattaactgtttcgatataatcatcgtaactgcttctaacggctaaattttttttatccgccatttagaagctaaaaatatttttatttatacagaagatttaactagattatacaatgaactaatatgatccttttccagattatttacaaacttggtattttttggttctggaggaggcgaatttaaattcggacttggattcggattttgtgagttcttgatcttattatacatcgagtataggatggcgacggtaactgctacgcaaataccgatcaacaaaagaataccaatcatttattgacaataacttcactattgatcaagtatgcaatatatcatcttttcactaaataagtagtaataatgattcaacaatgtcgagatatatggacgataataatttagttcatggaaatatcgctatgattggtatgaatgactccgctaactctgtggggtgcgcagtgctttccccacatagaataaattagcattccgactgtgataataataccaagtataaacgccataatactcaatactttccatgtacgagtgggactggtagacttactaaagtcaataaaggcgaagatacacgaaagaatcaaaagaatgattccagcgattagcacgccggaaaaataatttccaatcataagcatcatgtccatttaactaataaaaattttaaatcgccgaatgaacaaagtggaatataaaccatataaaaacaatagtttgtactgcaaaaataatatctatttttgttttcgaagatatggtaaaattaaatagtagtacacagcatgttataactaacagcagcaacggctcgtaattacttatcatttactagacgaaaaggtggtgggatattttcttgctcaaataatacgaatatatcacccatccattttatgcgatgtttatatactctaatctttaatagatctatagacgacgggtttaccaacaatatagattttatcgattcatctaatttaaacccttccttaaacgtgaatgatctattatctggcataacgatgactctacctgatgaatcggacaatgtactgggccatgtagaataaattatcaacgaattatcgtctacgaacatttatatcatttgttttaattttaggacgcgaataaatagatataaaatagaaaataacagatattacaaccaatgttatggccgcgcccaaccaggtaggcagttttattttatcttttactacaggttctcctggatgatgtacgtcaccaacggcggacgtagttctagtacaattagacgtaagttctgcttgggaattttttaacgctaaagagttaacgttaatcgtgcacccaacgtatttacatctagttctttgaacatcttgattataatataaccattttctatctctagattcgtcggtgcactcatgtaaccaacataccctaggtcctaaatatttatctccggaattagattttggataattcgcgcaccaacaatttctatttcctttatgatcgttacaaaagacgtataatgccgtatccccaaaagtaaaataatcaggacgaataattctaataaactcagaacaatatctcgcatccatatgtttggagcaaatatcggaataagtagacatagccggtttccgttttgcacgtaaccattctaaacaattggggtttccaggatcgtttctacaaaatccagtcatgaaatcgtcacaatgttctgtcttgtaattattattaaatatttttggacagtgtttggtatttgtcttagaacaacattttgctacgctatcactatcgcccaggagataatccttttttataaaatgacatcgttgcccggatgctatataatcagtagcgtgttttaaatccttaatatattcaggagttacctcgttctgataatagattaatgatccaggacgaaatttgaaagaactacatggttctccatgaattaatacatattgtttagcaaattcaggaactataaaactactacaatgatctatcgacataccatctatcaaacaaaatttgggtttaatttctcccggagatgtttcataatagtacgtataactttcttctgcaaacttaacagctctattatattcaggataattaaaacctaattccatatatttgtctcgtatatctgctattcctggtgctattttgattctattaagagtaacagctgcccccattcttaataatcgtcagtatttaaactgttaaatgttggtatatcaacatctaccttatttcccgcagtataaggtttgttgcaggtatactgttcaggaatggttacatttatacttcttctatagtcctgtctttcgatgttcatcacatatgcaaagaacagaataaacaaaataatgtaagaaataatattaaatatctgtgaattcgtaaatacattgattgccataataattacagcagctacaatacacacaatagacattcccacagtgttgccattacctccacgatacatttgagttactaagcaataggtaataactaagctagtaagaggcaatagaaaagatgagataaatatcatcaatatagagattagaggagggctatatagagccaagacgaacaaaatcaaaccgagtaacgttctaacatcattatttttgaagattcccaaataatcattcattcctccataatcgttttgcatcatacctccatctttaggcataaacgattgctgctgttcctctgtaaataaatctttatcaagcactccagcacccgcagagaagtcgtcaagcatattgtaatatcttaaataactcatttatatattaaaaaatgtcactattaaagatggagtataatctttatgccgaactaaaaaaaatgacttgtggtcaacccctaagtctttttaacgaagacggggatttcgtagaagttgaaccgggatcatcctttaagtttctgatacctaagggattttacgcctctccttccgtaaagacgagtctagtattcgagacattaacaacgaccgataataaaatcactagtatcaatccaacaaatgcgccaaagttatatcctcttcaacgcaaagtcgtatctgaagtagtttctaatatgaggaaaatgatcgaatcaaaacgtcctctatacattactcttcacttggcgtgtggatttggtaagactattaccacgtgttatcttatggctacacacggtagaaaaaccgtcatttgcgtacccaataaaatgttaatacatcaatggaagacacaggtagaggcagtcggattggaacataagatatccatagatggagtaagtagtctattaaaggaactaaagactcaaagtccggatgtattaatagtagtcagtagacatctgacaaacgatgccttttgtaaatatatcaataagcattatgatttgttcatcttggatgaatcacatacgtataatctgatgaacaatacagcagttacaagatttttagcgtattatcctccgatgatgtgttattttttaactgctacacctagaccagctaaccgaatttattgtaacagtattattaatattgccaagttatccgatctaaaaaaaactatctatgcggtagatagtttttttgagccatattccacagataatattagacatatgataaaacgattagatggaccatctaataaatatcatatatatactgagaagttattatctgtagacgagcctagaaatcaacttattcttgataccctggtagaagaattcaagtcaggaactattaatcgaattttagttattactaaactacgtgaacatatggtattcttctacaaacgattattagatcttttcggaccagaggttgtatttataggagacgcccaaaatagacgtactccagatatggtcaaatcaatcaaggaactaaatagatttatattcgtatccaccttattttattccggtactggtttagatattcctagtttggattcgttgttcatttgctcggcagtaatcaacaatatgcaaatagagcaattactagggagggtatgtcgagaaacagaactattagataggacggtatatgtatttcctagcacatccatcaaagaaataaagtacatgataggaaatttcatgcaacgaattattagtctgtctgtagataaactaggatttaaacaaaaaagttatcggaaacatcaagaatccgatcccacttctgtatgtacaacatcctccagagaagaacgtgtattaaatagaatatttaactcgcaaaatcgttaagaagtttaagcgacgatccgcatgctgcgcaggccagtgtattacccctcatagtattaatataatccaatgatacttttgtgatgtcggaaatcttaaccaatttagactgacaggcagaacacgtcatgcaatcatcatcgtcatcgataactgtagtcttgggcttctttttgcggctcttcattccggaacgcacattggtgctatccatttaggtagtaaaaaataagtcagaatatgccctatagcacgatcgtgcaaaacctggtatatcgtctctatctttatcacaatatagtgtatcgacatctttattattattgacttcgtttatcttggaacatggaatgggaacatttttgttatcaacggccacctttgccttaattccagatgttgtaaaattataactaaacagtctatcatcgacacaaatgaaattcttgtttagacgtttgtagtttacgtatgcggctcgttcgcgtctcattttttcagatattgcaggtactataatattaaaaataagaatgaaataacataggattaaaaataaagttatcatgacttctagcgctgatttaactaacttaaaagaattacttagtctgtacaaaagtttgagattttcagattctgcggctatagaaaagtataattctttggtagaatggggaacatctacttactggaaaataggcgtgcaaaaggtagctaatgtcgagacgtcaatatctgattattatgatgaggtaaaaaataaaccgtttaatattgatccgggctattacattttcttaccggtatattttgggagcgtctttatttattcgaagggtaaaaatatggtagaacttggatctggaaactcttttcaaataccagatgatatgcgaagtgcgtgtaacaaagtattagacagcgataacggaatagactttctgagatttgttttgttaaacaatagatggataatggaagatgctatatcaaaatatcagtctccagttaatatatttaaactagctagtgagtacggattaaacatacccaaatatttagaaattgaaatagaggaagacacattatttgacgacgagttatactctattatagaacgctcttttgatgataaatttccaaaaatatccatatcgtatattaagttgggagaacttagacggcaagttgtagactttttcaaattctcgttcatgtatattgagtccatcaaggtagatcgtataggagataatatttttattcctagcgttataacaaaatcaggaaaaaagatattagtaaaagatgtagaccatttaatacgatccaaggttagagaacatacatttgtaaaagtaaaaaagaaaaacacattttccattttatacgactatgatggaaacggaacagaaactagaggagaagtaataaaacgaattatagacactataggacgagactattatgttaacggaaagtatttctctaaggttggtagtgcaggcttaaagcaattgactaataaattagatattaatgagtgcgcaactgtcgatgagttagttgatgagattaataaatccggaactgtaaaacgaaaaataaaaaaccaatcagcatttgatttaagcagagaatgtttgggatatccagaagcggattttataacgttagttaataacatgcggttcaaaatagaaaattgtaaggttgtaaatttcaatattgaaaatactaattgtttaaataacccgagtattgaaactatatatagaaactttaaccagttcgtctcaatctttaatgtcgtcaccgatgtcaaaaaaagattattcgagtgaaataatatgcgcctttgatataggtgcaaaaaatcctgccagaactgttttagaagtcaaggataactccgttagggtattggatatatcaaaattagactggagttctgattgggaaaggcgcatagctaaagatttgtcacaatatgaatacactacagttcttctagaacgtcagcctagaaggtcgccgtatgttaaatttatctattttattaaaggctttttatatcatacatcggctgccaaagttatttgcgtctcgcctgtcatgtctggtaattcatatagagatcgaaaaaagagatcggtcgaagcatttcttgattggatggacacattcggattgcgagactccgttccggatagacgcaaattagacgatgtagcggatagtttcaatttggctatgagatacgtattagataaatggaatactaattatacaccttataataggtgtaaatctaggaattacataaaaaaaatgtaataacgttagtaacgccattatggataatctatttacctttctacatgaaatagaagatagatatgccagaactatttttaactttcatctaataagttgcgatgaaataggagatatatatggtcttatgaaagaacgaatttcctcagaggatatgtttgataatatagtgtataataaagatatacatcatgccattaagaaactagtgtattgcgacatccaacttactaaacacattattaatcagaatacgtatccggtatttaacgattcttcacaagtgaaatgttgtcattatttcgatataaactcagataatagcaatattagctctcgtacagtagagatatttgagagggaaaagtcatctcttgtatcatatattaaaactaccaataagaagagaaaggtcaattacggcgaaataaagaaaactgttcatggaggcactaatgcaaattacttttccggtaaaaagtctgatgagtatctgagtactacagttagatccaacattaatcaaccttggatcaaaaccatttctaagagaatgagagtagatatcattaatcactctatagtaacgcgtggaaaaagctctatattacaaactatagaaattatttttactaatagaacatgtgtgaaaatattcaaggattctactatgcacattattctatccaaggacaaggatgaaaaggggtgtatacacatgattgacaaattattctatgtctattataatttatttctgttgttcgaagatatcatccaaaacgagtactttaaagaagtagctaatgttgtaaaccacgtacttacggctacggcattagatgagaaattattcctaattaagaaaatggctgaacacgatgtttatggagttagcaatttcaaaatagggatgtttaacctgacatttattaagtcgttggatcataccgttttcccctctctgttagatgaggatagcaaaataaagttttttaaggggaaaaagctcaatattgtagcattacgatctctggaggattgtataaattacgtgactaaatccgagaatatgatagaaatgatgaaggaaagatcgactattttaaatagcatagatatagaaacggaatcggtagatcgtctaaaagaattgcttctaaaatgaaaaaaaacactgattcagaaatggatcaacgactcggatataagtttttggtgcctgatcctaaagccggagttttttatagaccgttacatttccaatatgtatcgtattctaattttatattgcatcgattgcatgaaatcttgaccgtcaagcggccactcttatcgtttaagaataatacagaacgaattatgatagaaattagcaatgttaaagtgactcctccagattactcacctataatcgcgagtattaaaggtaagagttatgacgcattagccacgttcactgtaaatatctttaaagaggtaatgaccaaagagggtatatccatcactaaaataagtagttatgagggaaaagattctcatttgataaaaattccgctactaataggatacgggaataaaaatccacttgatacagccaagtatcttgttcctaatgtcataggtggagtctttatcaataaacaatctgtcgaaaaagtaggaattaatctagtagaaaagattacaacatggccaaaatttagggttgttaagccaaactcattcactttctcgttttcctccgtatcccctcctaatgtattaccgacaagatatcgccattacaagatatctctggatatatcacaattggaagcgttgaatatatcatcgacaaagacatttataacggtcaatattgttttgctgtctcaatatttatctagagtgagtctagaattcattagacgtagcttatcatacgatatgcctccagaagttgtctatctagtaaacgcgataatagatagtgctaaacgaattactgaatctattactgactttaatattgatacatacattaatgacctggtggaagctgaacacattaaacaaaaatctcagttaacgatcaacgagttcaaatatgaaatgctgcataactttttacctcatatgaactatacacccgatcaactaaagggattttatatgatatctttactaagaaagtttctctactgtatctaccacacttctagatatccagatagagattcgatggtttgtcatcgtatactaacatacggcaaatattttgagacgttggcacatgatgaattagagaattacataggcaacatccgaaacgatatcatgaacaatcacaagaacagaggcacttacgcggtaaacattcatgtactaacaactcctggacttaatcatgcattttctagcttattgagtggaaagttcaaaaagtcagacggtagttatcgaacacatcctcactattcatggatgcagaatatttctattcctaggagtgttggattttatccggatcaagtaaagatttcaaagatgttttctgtcagaaaataccatccaagtcaatatctttacttttgttcatcagacgttccggaaagaggtcctcaggtaggtttagtatctcaattgtctgtcttgagttccattacaaatatactaacgtctgagtatttggatttggaaaagaaaatttgtgagtatatcagatcatattataaagatgatataagttactttgaaacaggatttccaatcactatagaaaatgctctagtcgcatctcttaatccaaatatgatatgtgattttgtaactgactttagacgtagaaaacggatgggattcttcggtaacttggaggtaggtattactttagttagggatcacatgaatgaaattcgcattaatattggagcgggaagattagtcagaccattcttggttgtggataacggagagctcatgatggatgtgtgtccggagttagaaagcagattagacgatatgacattctctgacattcagaaagagtttccacatgtcatcgaaatggtagatatagaacaatttacttttagtaacgtatgtgaatcggttcaaaaatttagaatgatgtcaaaggatgaaagaaagcaatacgatttatgtgactttcctgccgaatttagagatggatatgtggcatcttcattagtgggaatcaatcacaattctggacccagagctattcttggatgtgctcaagctaaacaagctatctcttgtctgagttcggatatacgaaataaaatagacaatggaattcatttgatgtatccagagaggccaatcgtgattagtaaggctttagaaacttcaaagattgcggctaattgcttcggccaacatgttactatagcattaatgtcgtacaaaggtatcaatcaagaggatggaattatcatcaaaaaacaatttattcagagaggcggtctcgatatagttaccgcaaagaaacatcaagtagaaattccgttggaaaactttaataacaaagaaagagataggtctaatgcatattcgaaattagaaagtaatggattagttagactgaatgctttcttggaatccggagacgctatggcacgaaatatctcatcaagaactcttgaagatgattttgctagagataatcagattagcttcgatgtttccgagaaatataccgatatgtacaaatctcgcgttgaacgagtacaagtagaacttactgacaaagttaaggtacgagtattaaccatgaaagaaagaagacccattctaggagacaaatttaccactagaacgagtcaaaagggaacagtcgcgtatgtcgcggatgaaacggaacttccatacgatgaaaatggtatcacaccagatgtcattattaattctacatccatcttctctagaaaaactatatctatgttgatagaggttattttaacagccgcatattctgctaagccgtacaacaataagggagaaaaccgacctgtctgttttcctagtagtaacgaaacatccatcgatacatatatgcaattcgctaaacaatgttatgagcattcaaatccgaaattgtctgatgaagaattatcggataaaatcttttgtgaaaagattctctatgatcctgaaacggataagccttatgcatccaaagtattttttggaccaatttattacttgcgtctgaggcatttaactcaggacaaggcaaccgttagatgtagaggtaaaaagacgaagctcattagacaagcgaatgagggacgaaaacgtggaggaggtattaagtttggagaaatggagagagactgtttaatagcgcatggcgcagccaatactattacagaagttttgaaagattcggaagaagattatcaagatgtgtatgtttgtgaaaattgtggagacatagcagcacaaatcaagggtattaatacatgtcttagatgttcaaaacttaatctctctcctctcttaacaaaaattgataccacgcacgtatctaaagtatttcttactcaaatgaacgccagaggcgtaaaagtcaaattagatttcgaacgaaggcctccttcgttttataaaccattagataaagttgatctcaagccgtcttttctggtgtaatattctagtttggtagtagatacatatcaatatcatcaaattcgagatccgaattataaaatgggcgtggattgttaactatagaatcggacgtctgatattcgaaaatctgtggagtttcaggttttggtggaggtgtaactgctacttgggatactgaagtctgatattcagaaagctgggggatgttctggttcgacatccaccgatggtgtcacatcactaatcggttcggtaacgtctgtggatggaggtgctacttctacagaacctgtagcctcagttgtcaacggagatacatttttaatgcgaggaaatgtataatttggtaatggtttctcatgtggatctgaagaagaggtaagatatctactagaaagataccgatcacgttctagttctcttttgtagaacttaactttttctttctcagcatctagttgatattccaacctcttcacgttactacgttcagatttcaattcacgttcgcatgggttacctccgcagtttttacgagcgatttcacgttcagccttcatgcgtctctgtgatccgtttacgttaaaccataaatacatgggtgatcctataaacatgaatttatttctaattctcagagctatagttaattgaccgtgtaatatttgcttacatgcatacttgatacgctcattaataagatttttatcattgctcgttatctcagaatcgtatatataaggagtaccatcgtgattcttaccagatattatacaaaatactatatataaaatatattgaccaacgttagtaatcatataaatgtttaacgttttaaattttgtattcaatgatccattatcatacgctagcatggtcttatgatattcattctttaaaatataatattgtgttagccattgcattggagctcctaatggagattttctattctcgtccattttaggatatgctttcataaagtccctaataacttcgtgaataatgtttctatgttttctactgatgcatgtatttgcttcgatttttttatcccatgtttcatctatcatagatttaaacgcagtaatgctcgcaacattaacatcttgaaccgttggtacaattccgttccataaatttataatgttcgccatttatataactcattttttgaatatacttttaattaacaaaagagttaagttactcatatggacgccgtccagtctgaacatcaatctttttagccagagatatcatagccgctcttagagtttcagcgtgattttccaacctaaatagaacttcatcgttgcgtttacaacacttttctatttgttcaaactttgttgttacattagtaatctttttttccaaattagttagccgttgtttgagagtttcctcattgtcgtcttcatcggctttaacaattgcttcgcgtttagcctctggctttttatcagcctttgtagaaaaaaattcagttgctggaattgcaagatcgtcatctccggggaaaagagttccgtccatttaaagtacagattttagaaactgacactctgcgttatttatatttggtacaacacatggattataaatattgatgttaataacatcagaaaatgtaaagtctatacattgttgcatcgtgttaaattttctaatggatctagtattattgggtccaacttctgcctgaaatccaaatatggaagcggatacaaaaccgtttcctggataaaccacacatctccacttttgctttacatcagaaattgtgtcgttgacatcttgaactctcctatctaatgccggtgttccacctatagattttgaatattcgaatgctgcatgagtagcattaaattccttaatattgccataattttcatatattgagtaaccctggataaaaagtaaacacaccgcagccgtcgctaccacaataaaaaaaattgatagagagttcatttataatctattagaagctgacaaaatttttttacacgcatcagacaatgctttaataaatagttcaacatctacttttgtcatatcgaaccgatggtatgattctaacctagaattacatccgaaaaagttgactatgttcatagtcattaagtcattaacaaacaacattccagactctggattataagacgatactgtttcgtcacaatcacctaccttaatcatgtgattatgaatattggctattagagcaccttctaagaaatctataatatctttgaaacacgatttaaaatcaaaccacgaatatacttctacgaagaaagttagtttacccataggagagataactataaatggagatctaaatacaaaatccggatctatgatagttttaacattattatattctctattaaatacctccacatctaaaaatgttaattttgaaactatgtcttcgtttattaccgtacctgaactaaacgctataagctctattgtttgagaactctttaaacgatattcttgaaatacatgtaacaaagtttcctttaactcggtcggtttatctaccatagttacagaatttgtatccttatctataatataataatcaaaatcgtataaagttatataattatcgcgttcagattgggatcttttcaaatagactaaaaaccccatttctctagtaagtatcttatgtatatgtttgtaaaatatcttcatggtgggaatatgctctaccgcagttagccattcctcattgacagcggtagatgtattagacaaaactattccaatgtttaacaagggccattttacgagattattaaatccttgtttgataaatgtagccaatgagggttcgagttcaacgacgattgaattctcttcccgcggatgctgcatgatgaacgacgggatgttgttcgattgatttggaattctttttcgactttttgtttatattaaatattttaaaatttatagctgatagcaattcatgtaccacggataatgtagacgcgtattgcgcatcgatatctttattattagataaatttatcaataaatgtgagaagtttgcctcgttaaggtcttccatttaaatattatataaacatttgtgtttgtatcttattcgtcttttatggaatagttttttactagtaaagctgcaattacacactttgtccgtaaaacataaatataaacaccagcttttatcaatcgttccaaaaagtcgacggcggacatttttaacatggcatctattttaaatacacttaggtttttggaaaaaacatcattttataattgtaacgattcaataactaaagaaaagattaagattaaacataagggaatgtcatttgtattttataagccaaagcattctaccgttgttaaatacttgtctggaggaggtatatatcatgatgatttggttgtattggggaaggtaacaattaatgatctaaagatgatgctattttacatggatttatcatatcatggagtgacaagtagtggagtaatttacaaattgggatcgtctatcgatagactttctctaaataggactattgttacaaaagttaataattatgatgatacattttttgacgacgatgattgatcgctattgcacaattttgtttttttactttctaatatagcgtttagattctttttcatgtgcgaatattgatttactaaaatatcgatgtttaacttttgttctatgacgtccttatcggcggtatcggtacatatacgtaattcaccttcacaaaatacggagtcttcgataataatagccaatcgattattggatctagctgtctgtatcatattcaacatgtttaatatatcctttcgtttcccctttacaggcatcgatcgtagcatattttccgcgtctgagatggaaatgttaaaactacaaaaatgcgtaatgttagcccgtcctaatattggtacgtgtctataagtttggcatagtagaataatagacgtgtttaaatgccttccaaagtttaagaattctattagagtattgcattttgatagtttatcgcctacatcatcaaaaataagtaaaaagtgtgctgattttttatgattttgtgcgacagcaatacatttttctatgttacttttagttcgtatcagattatattctagagattcctgactactaacgaaattaatatgatttggccaaatgtatccatcataatctgggttataaacgggtgtaaacaagaatatatgtttatattttttaactagtgtagaaaacagagatagtaaatagatagtttttccagatccagatcctcccgttaaaaccattctaaacggcatttttaataaattttctcttgaaaattgtttttcttggaaacaattcataattatatttacagttactaaattaatttgataataaatcaaaatatggaaaactaaggtcgttagtagggaggagaacaaagaaggcatatcgtgatataaataacatttattatcatgatgacaccagaaaacgacgaagagcagacatctgtgttctccgctactgtttacggagacaaaattcaaggaaagaataaacgcaaacgcgtgattggtctatgtattagaatatctatggttatttcactactatctatgattaccatgtccgcgtttctcatagtgcgcctaaatcaatgcatgtctgctaacgaggctgctattactgacgccgctgttgccgttgctgctgcatcatctactcatagaaaggttgcgtctagcactacgcaatatgatcacaaagaaagctgtaatggtttatattaccagggttcttgttatatattacattcagactaccagttattctcggatgctaaagcaaattgcactgcggaatcatcaacactacccaataaatccgatgtcttgattacctggctcattgattatgttgaggatacatggggatctgatggtaatccaattacaaaaactacatccgattatcaagattctgatgtatcacaagaagttagaaagtatttttgtgttaaaacaatgaactaatatttatttttgtacattaataaatgaaatcgcttaatagacaaactgtaagtatgtttaagaagttgtcggtgccggccgctataatgatgatactctcaaccattattagtggcataggaacatttctgcattacaaagaagaactgatgcctagtgcttgcgccaatggatggatacaatacgataaacattgttatctagataccaacattaaaatgtccacagataatgcggtttatcagtgtcgtaaattacgagctagattgcctagacctgatactagacatctgagagtattgtttagtattttttataaagattattgggtaagtttaaaaaagaccaataataaatggttagatattaataatgataaagatatagatattagtaaattaacaaattttaaacaactaaacagtacgacggatgctgaagcgtgttatatatacaagtctggaaaactggttaaaacagtatgtaaaagtactcaatctgtactatgtgttaaaaaattctacaagtgacaacaaaaaatgaattaataataagtcgttaacgtacgccgccatggacgccgcgtttgttattactccaatgggtgtgttgactataacagatacattgtatgatgatctcgatatttcaatcatggactttataggaccatacattataggtaacataaaaactgtccaaatagatgtacgggatataaaatattccgacatgcaaaaatgctactttagctataagggtaaaatagttcctcaggattctaatgatttggctagattcaacatttatagcatttgtgccgcatacagatcaaaaaataccatcatcatagcatgcgactatgatatcatgttagatatagaagataaacatcagccattttatctattcccatctattgatgtttttaacgctacaatcatagaagcgtataacctgtatacagctggagattatcatctaatcatcaatccttcagataatctgaaaatgaaattgtcgtttaattcttcattctgcatatcagacggcaatggatggattataattgatgggaaatgcaatagtaattttttatcataaaagttgtaaagtaaataataaaacaataaatattgaactagtagtacgtatattgagcaatcagaaatgatgctggtacctcttatcacggtgacagtagttgcgggaacaatattagtatgttatatattatatatttgtaggaaaaagatacgtactgtctataatgacaataaaattatcatgacaaaattaaaaaagataaagagttctaattccagcaaatctagtaaatcaactgatagcgaatcagactgggaggatcactgtagtgctatggaacaaaacaatgacgtagataatatttctaggaatgagatattggacgatgatagcttcgctggtagtttaatatgggataacgaatccaatgttatggcgcctagcacagaacacatttacgatagtgttgctggaagcacgctgctaataaataatgatcgtaatgaacagactatttatcagaacactacagtagtaattaatgaaacggagactgttgaagtacttaatgaagataccaaacagaatcctaactattcatccaatcctttcgtaaattataataaaaccagtatttgtagcaagtcaaatccgtttattacagaacttaacaataaatttagtgagaataatccgtttagacgagcacatagcgatgattatcttaataagcaagaacaagatcatgaacacgatgatatagaatcatcggtcgtatcattggtgtgattagtttcctttttataaaattgaagtaatatttagtattattgctgccgtcacgttgtacaaatggagatattccctgtattcggcatttctaaaattagcaattttattgctaataatgactgtagatattatatagatacagaacatcaaaaaattatatctgatgagatcaatagacagatggatgaaacggtacttcttaccaacatcttaagcgtagaagttgtaaatgacaatgagatgtaccatcttattccccatagactatcgactattatactctgtattagttctgtcggaggatgtgttatctctatagataatgacgtcaatggcaaaaatattctaacctttcccattgatcatgctgtaatcatatccccactgagtaaatgtgtcgtagttagcaagggtcctacaaccatattggttgttaaagcggatatacctagcaaacgattggtaacatcgtttacaaacgacatactgtatgtaaacaatctatcactgattaattatttgccgttgtctgtattcattattagacgagttaccgactatttggatagacacatatgcgatcagatatttgcgaataataagtggtattccattataaccatcgacaataagcagtttcctattccatcaaactgtataggtatgtcctctgccaagtacataaattctagcatcgagcaagatactttaatacatgtttgtaacctcgagcatccattcgacttagtatacaaaaaaatgcagtcgtacaattctgtacctatcaaggaacaaatattgtacggtagaattgataatataaatatgagcattagtatttctgtgtattaatagatttctagtatggggatcattaatcatctctaatctctaaatacctcataaaacgaaaaaaaagctattatcaaatactgtacggaatggattcattctcttctctttttatgaaactctgttgtatatctactgataaaactggaagcaaaaaatctgatagaaagaataagaataagatcaagatcaaggattatatggaacacgattattataaaataacaatagttcctggttcctcttccacgtctactagctcgtggtattatacacatgcctagtaatagtctctttgcgttgacggaaagcagactagaaataacaggctaaaatgttcagacaccataatagttcccaacccagataataacagagtaccatcaacacattcctttaaactcaatcccaaacccaaaaccgttaaaatgtatccggccaattgatagtagataatgaggtgtacagcgcatgataatttacacagtaaccaaaatgaaaatactttagtaattataagaaatatagatggtaacgtcatcatcaacaatccaataatatgccggagagtaaacattgacggataaaacaaaaatgctccgcataactctatcatggcaataacacaaccaaatacttgtaagattcctaaattagtagaaaatacaacggatatcgatgtataagtgatctcgagaaataataagaataaagtaatgcccgtaaagataaacatcaacattgtttggtaatcattaaaccaattagtatgaagttgaactaatttcacagtagattttattccagtgttatcctcgcatgtataagtacctggtaagatatctttatattctataatcaatgagacatcactatccgataacgaatgaagtctagcactagtatgccatttacttaatattgtcgtcttggaagttttattataagttaaaatatcatggttatccaatttccatctaatatactttgtcggattatctatagtacacggaataatgatggtatcattacatgctgtatactctatggtctttgtagttgttataacaaccaacgtatagaggtatatcaacgatattctaactcttgacattttttatttatttaaaatgatacctttgttatttattttattctattttgctaacggtattgaatggcataagtttgaaacgagtgaagaaataatttctacttacttattagacgacgtattatacacgggtgttaatggggcggtatacacattttcaaataataaactaaacaaaactggtttaactaataataattatatcacaacatctataaaagtagaggatgcggataaggatacattagtatgcggaaccaataacggaaatcccaaatgttggaaaatagacggttcagacgacccaaaacatagaggtagaggatacgctccttatcaaaatagcaaagtaacgataatcagttacaacgaatgtgtactatctgacataaacatatcaaaagaaggaattaaacgatggagaagatttgacggaccatgtggttatgatttatacacggcggataacgtaattccaaaagatggtttacgaggagcattcgtcgataaagatggtacttatgacaaagtttacattcttttcactgatactatcggctcaaagagaattgtcaaaattccgtatatagcacaaatgtgcctaaacgacgaaggtggtccatcatcattgtctagtcatagatggtcgacgtttctcaaagtcgaattagaatgtgatatcgacggaagaagttatagacaaattattcattctagaactataaaaacagataatgatacgatactatatgtattcttcgatagtccttattccaagtccgcattatgtacctattctatgaataccattaaacaatctttttctacgtcaaaattggaaggatatacaaagcaattgccgtctccagctcctggtatatgtttaccagctggaaaagttgtttcacataccacgtttgaagtcatagaaaaatataatgtactagatgatattataaagcctttatctaaccaacctatcttcgaaggaccgtctggtgttaaatggttcgatataaaggagaaggaaaatgaacatcgggaatatagaatatacttcataaaagaaaattctatatattcgttcgatacaaaatctaaacaaactcgtagctcgcaagtcgatgcgcgactattttcagtaatggtaacttcgaaaccgttatttatagcagatatagggataggagtaggaatgccacaaatgaaaaaaatacttaaaatgtaatcttaatcgagtacaccacacgacaatgaacaaacctaagacagattatgctggttatgcttgctgcgtaatatgcggtctaattgtcggaattatttttacagcgacactattaaaagttgtagaacgtaaattagttcatacaccatcaatagataaaacgataaaagatgcatatattagagaagattgtcctactgactggataagctataataataaatgtatccatttatctactgatcgaaaaacctgggaggaaggacgtaatacatgcaaagctctaaatccaaattcggatctaattaagatagagactccaaacgagttaagttttttaagaagccttagacgaggctattgggtaggagaatccgaaatattaaaccagacaaccccatataattttatagctaaaaatgccacgaagaatggaaatatatttgtagcacaacgaatactcccaaactgcattcgtgttacactatataacaattacactacatttttatcataccactacttcggttagatgttttagaaaaaaataaatatcgccgtaccgttcttgtttttataaaaataacaattaacaattatcaaattttttctttaatattttacgtggttgaccattcttggtggtaaaataatctcttagtgttggaatggaatgctgtttaatgtttccgcactcatcgtatattttgacgtatgcagtcacatcgtttacgcaatagtcagactgtagttctatcatgcttcctacatcagaaggaggaacagttttaaagtctcttggttttaatctattgccattagttttcatgaaatcctttgttttatccacttcacattttaaataaatgtccactatacattcttctgttaattttactagatcgtcatgggtcatagaatttataggttccgtagtccatggatccaaactagcaaacttcgcgtatacggtatcgcgattagtgtatacaccaactgtatgaaaattaagaaaacagtttaatagatcaacagaaatatttaatcctccgtttgatacagatgcgccatatttatggatttcggattcacacgttgtttgtctgaggggttcgtctagcgttgcttctacgtaaacttcgattcccatatattctttattgtcagaatcgcataccgatttatcatcatacactgtttgaaaactaaatggtatacacatcaaaataataaataataacgagtacattctgcaatattgttatcgtaattggaaaaatagtgttcgagtgagttggattatgtgagtattggattgtatattttattttatattttatattttatattttgtaataagaataaaatgctaatgtcaagtttattccaatagatgtcttattaaaaaacatatataataaataacaatggctgaatggcataaaattatcgaggatatctcaaaaaataataagttcgaggatgccgccatcgttgattacaagactacaaagaatgttctagctgctattcctaacagaacatttgccaagattaatccgggtgaaattattcctctcatcactaatcgtaatattctaaaacctcttattggtcagaaatattgtattgtatatactaactctctaatggatgagaacacgtatgctatggagttgcttactgggtacgcccctgtatctccgatcgttatagcgagaactcataccgcacttatatttttgatgggtaagccaacaacatccagacgtgacgtgtatagaacgtgtagagatcacgctacccgtgtacgtgcaactggtaattaaaataaaaagtaatattcatatgtagtgtcaattttaaatgatgatgatgaaatggataatatccatattgacgatgtcaataatgccggtattggcatacagctcatcgatttttagatttcattcagaggatgtggaattatgttatgggcatttgtattttgataggatctataatgtagtaaatataaaatataatccgcatattccatatagatataattttattaatcgcacgttaaccgtagatgaactagacgataatgtcttttttacacatggttattttttaaaacacaaatatggttcacttaatcctagtttgattgtctcattatcaggaaacttaaaatataatgatatacaatgctcagtaaatgtatcgtgtctcattaaaaatttggcaacgagtacatctactatattaacatctaaacataagacttattctctacatcggtccacgtgtattactataataggatacgattctattatatggtataaagatataaatgacaagtataatgacatctatgattttactgcaatatgtatgctaatagcgtctacattgatagtgaccatatacgtgtttaaaaaaataaaaatgaactcttaattatgctatgctattagaaatggataaaatcaaaattacggttgattcaaaaattggtaatgttgttaccatatcgtataacttggaaaagataactattgatgttacaccaaaaaagaaaaggatgtattattagcgcaatcagttgctgtcgaagaggcaaaagatgtcaaggtagaagaaaaaaatattatcgatattgaagatgacgatgatatggatgtagaaagcgcgtaatactatctataaacataagtatataataaatactttttatttacggtactcttgtagtggtgataccctactcgattatttttttaaaaaaaaaatacttattctgattcttctaaccatttccgtgttcgtttgaatgccacatcgacgtcaaagataggggagtagttgaaatctagttctgcattgttggtacgcacctcaaatgtagtgttggatatcttcaacgtatagttgttgagtagtgatggttttctaaatagaattctcttcatatcattcttgcacgcgtacatttttagcatccatcttggaatcctagatccttgttctattcccaatggtttcatcaatagaagattaaacatatcgtacgaacacgatggagagtaatcgtagcaaaagtaagcatttcctttaatcttagatcccggatactggatatattttgcagccaacacgtgcatccatgcagcatttcctacatatacccggctatgtaccgcgttatcatcgactgtacgatacataatgttaccgtgttgcttacattgctcgtaaaagactttcgtcaatttgtctccttctccgtaaattccagtgggtcttaggcaacaagtatacaattttgctccattcatgattacggaattattggctttcataaccagttgctcggccatacgtttactttttgcgtatacatgtcctggtgatatatcataaagggtatgctcatggccgatgaatggatcaccgtgtttattgggtcctattgcttccatgctactagtatagatcaaatacttgattcctaggtccacacaagctgccaatatagtctgtgttccataatagtttactttcatgatttcattatcggtgtattttccaaatacatccactagagcagccgtatgaataatcagatttaccccatctagcgcttctctcaccttatcaaagtcgtttatatcacattgtatatagtttataaccttaactttcgaggttattggttgtggatcttctacaatatctatgactctgatttcttgaacatcatctgcactaattaacagttttactatatacctgcctagaaatccggcaccaccagtaaccgcgtacacggccattgctgccactcataatatcagactacttattctattttactaaataatggctgtttgtataatagaccacgataatatcagaggagttatttactttgaaccagtccatggaaaagataaagttttaggatcagttattggattaaaatccggaacgtatagtttgataattcatcgttacggagatattagtcaaggatgtgattccataggcagtccagaaatatttatcggtaacatctttgtaaacagatatggtgtagcatatgtttatttagatacagatgtaaatatatttacaattattggaaaggcgttatctatttcaaaaaatgatcagagattagcgtgtgaagttattggtatttcttacataaatgaaaagataatacattttcttacaattaacgagaatggcgtttgatatatcagttaatgcgtctaaaacaataaatgcattagtttacttttctactcagcaaaataaattagtcatacgtaatgaagttaatgatacacactacactgtcgaatttgatagggacaaagtagttgacacgtttatttcatataatagacataatgacaccatagagataagaggggtgcttccagaggaaactaatattggttgcgcggttaatacgccggttagtatgacttacttgtataataagtatagttttaaactgattttagcagaatatataagacacagaaatactatatccggcaatatttattcggcattgatgacactagatgatttggctattaaacagtatggagacattgatctattatttaatgagaaacttaaagtagactccgattcgggactatttgactttgtcaactttgtaaaggatatgatatgttgtgattctagaatagtagtagctctatctagtctagtatctaaacattgggaattgacaaataaaaagtataggtgtatggcattagccgaacatatatctgatagtattccaatatctgagctatctagactacgatacaatctatgtaagtatctacgcgggcacactgagagcatagaggatgaatttgattattttgaagacgatgattcgtctacatgttctgccgtaaccgacagggaaacggatgtataattttttttatagcgtgaaggatatgataaaaaatataattgttgtatttatcccattccaatcaccttatatgattctgtaaaaaaattatactgtaacacaataaaggagtcttatagatgtatagaggtcagatactggtttgataaactgtttattccacataagtatgtttgactttatggttagacccgcatactttaacaaatcactgaaaattggagttaggtattgacctctcagaatcagttgccgttctggaacattaaatgtattttttatgatatactccaacgcatttatgtgggcatacaacaagtcattactaatggagtattccaagagttttagttgtctagtatttaacaagagaagagatttcaacagactgtttatgaactcgaatgccgcctcattgtcgcttatattgatgatgtcgaattctcccaatatcatcaccgatgagtagctcatcttgttatcgggatccaagttttctaaagatgtcattaaaccctcgatcatgaatggatttatcatcatcgtttttatgttggacatgagcttagtccgtttgtccacatctatagacgacgatttctgaattatttcatatatccctctctttaactccaggaacttgtcaggatggtctactttaatatgttctcgtctaagagatgaaaatctttggatggttgcacgcgacttttctctaaaggatgacgttgcccaagatcctctcttaaatgaatccatcttatccttggacaagatggacagtctattttccttagatggtttaatatttttgttacccatgatctataaaggtagacctaatcgtctcggatgaccatatatttattttcagttttattatacgcataaattgtaaaaaatatgttaggtttacgaaaatgtctcgtggggcattaatcgtttttgaaggattggacaaatctggaaaaacaacacaatgtatgaacatcatggaatctataccggcaaacacgataaaatatcttaactttcctcagagatccactgtcactggaaagatgatagatgactatctaactcgtaaaaaaacctataatgatcatatagttaatctattattttgtgcaaatagatgggagtttgcatcttttatacaagaacaactagaacagggaattactttaatagttgatagatacgcattttctggagtagcgtatgccgccgctaaaggcgcgtcaatgactctcagtaagagttatgaatctggattgcctaaacccgacttagttatattcttggaatctggtagcaaagaaattaatagaaacgtcggcgaggaaatttatgaagatgttacattccaacaaaaggtattacaagaatataaaaaaatgattgaagaaggagatattcattggcaaattatttcttctgaattcgaggaagatgtaaagaaggagttgattaagaatatagttatagaggctatacacacggttactggaccagtggggcaactgtggatgtaatagtgaaattacattttttataaatagatgttagtacagtgttataaatggatgaagcatattactctggcaacttggaatcagtactcggatacgtgtccgatatgcataccgaactcgcatcaatatctcaattagttattgccaagatagaaactatagataatgatatattaaacaaggacattgtaaattttatcatgtgtagatcaaacttggataatccatttatctctttcctagatactgtatatactattatagatcaagagaactatcagactgagttgattaattcattagacgacaatgaaattatcgattgtatagttaataagtttatgagcttttataaggataacctagaaaatatagtagatgctatcatcactctaaaatatataatgaataatccagattttaaaactacgtatgccgaagtactcggttccagaatagccgatatagatattaaacaagtgatacgtaagaatatactacaattgtctaatgatatccgcgaacgatatttgtgaaaaatattaaaaaaaaatactttttttattaaatgacgtcgcttcgcgaatttagaaaattatgctgtgatatatatcacgcatcaggatataaagaaaaatctaaattaattagagactttataacagatagggatgataaatatttgatcattaagctattgcttcccggattagacgatagaatttataacatgaacgataaacaaattataaaattatatagtataatatttaaacaatctcaggaagatatgctacaagatttaggatacggatatataggagacactattaggactttcttcaaagaaaacacagaaatccgtccaagagataaaagcattttaactttagaagacgtggatagtttcttaactacgttatcatccgtaactaaagaatcgcatcaaataaaattattgactgatatcgcatccgtttgtacatgtaatgatttaaaatgtgtagtcatgcttattgataaagatctaaaaattaaagcgggtcctcggtacgtacttaacgctattagtcctaatgcctatgatgtgtttagaaaatctaataacttgaaagagataatagaaaattcatctaaacaaaatctagactctatatctatttctgttatgactccaattaatcccatgttagcggaatcgtgtgattctgtcaataaggcgtttaaaaaatttccatcaggaatgtttgcggaagtcaaatacgatggtgaaagagtacaagttcataaaaataataacgagtttgccttctttagtagaaacatgaaaccagtactctctcataaagtggattatctcaaagaatacataccgaaagcatttaaaaaagctacgtctatcgtattggattctgaaattgttcttgtagacgaacataatgtaccgctcccgtttggaagtttaggtatacacaaaaagaaagaatataaaaactctaacatgtgtttgttcgtgtttgactgtttgtactttgatggattcgatatgacggacattccattgtacgaacgaagatcttttctcaaagatgttatggttgaaatacccaatagaatagtattctcagagttgacgaatattagtaacgagtctcagttaactgacgtattggatgatgcactaacgagaaaattagaaggattggtcttaaaagatattaatggagtatacgaaccgggaaagagaagatggttaaaaataaagcgagactatttgaacgagggttccatggcagattctgccgatttagtagtactaggtgcctactatggtaaaggagcaaagggtggtatcatggcagtctttctaatgggttgttacgacgatgaatccggtaaatggaagacggtaactaaatgttccggtcacgatgataatacgttaagggttttgcaagaccaattaacgatgattaaaattaacaaggatcccaaaaaaattccagagtggttagtagttaataaaatctatattcccgattttgtagtagaggatccgaaacaatctcagatatgggaaatttcaggagcagagtttacatcttccaagtcccataccgcaaatggaatatccattagatttcctagatttactaggataagagaggataaaacgtggaaagaatctactcatctaaacgatttagtaaacttgactaaatcttaatagttacatacaaactgaaaattaaaataacaccatttagttggtggtcgccatggatggtgttattgtatactgtctaaacgcgttagtaaaacatggcgaggaaataaatcatataaaaaatgatttcatgattaaaccatgttgtgaaagagtttgtgaaaaagttaagaacgttcacattggcggacaatctaaaaacaatacagtgattgcagatttgccatatatggataatgctgtatcggatgtatgcaattcactgtataaaaagaatgtatcaagaatatccagatttgctaatttgataaagatagatgacgatgacaagactcctactggtgtatataattattttaaacctaaagatgttattcctgttatcatatctataggaaaggataaagatgtctgtgaactattaatctcatcagacatatcgtgtgcatgcgtggagttaaattcatataaagtagccattcttcccatggatgtttccttttttaccaaaggaaatgcatcattgattattctcctgtttgatttctctatcgatgcagcacctctcttaagaagtgtaaccgataataatgttattatatctagacaccagcgtctacatgacgagcttccgagttccaattggttcaagttttacataagtataaagtccgactattgttctatattatatatggttgttgatggatctgtgatgcatgcgatagctgataatagaactcacgcaattattagcaaaaatatattagacaatactacgattaacgatgagtgtagatgctgttattttgaaccacagattaggattcttgatagagatgagatgctcaatggatcatcgtgtgatatgaacagacattgtattatgatgaatttacctgatgtaggcgaatttggatctagtatgttggggaaatatgaacctgacatgattaagattgctctttcggtggctggtaatttaataagaaatcgagactacattcccgggagacgaggatatagctactacgtttacggtatagcctctagataatttttttaagcacgaaataaaaaacataattttaaaccaatctatttcatactattttgtgtgatcaccatggacataaagatagatattagtatttctggtgataaatttacggtgactactaggagggaaaatgaagaaagaaaaaaatatctacctctccaaaaagaaaaaactactgatgttatcaaacctgattatcttgagtacgatgacttgttagatagagatgagatgtctactattctagaggaatattttatgtacagaggtctattaggcctcagaataaaatatggacgactctttaacgaaattaaaaaattcgacaatgatgcggaagaacaattcggtactatagaagaactcaagcagaaacttagattaaattctgaagagggagcagataactttatagattatataaaggtacaaaaacaggatatcgtcaaacttactgtatacgattgcatatctatgataggattgtgtgcatgcgtggtagatgtttggagaaatgagaaactgttttctagatggaaatattgtttacgagctattaaactgtttattaatgatcacatgcttgataagataaaatctatactgcagaatagactagtatatgtggaaatgtcatagaaagttaaaagttaatgagagcaaaaatatataaggttgtattccatatttgttattttttctgtaatagttaaaaaaatacattcgatggtctatctatcagattattatgtgttataaggtactttttctcataataaactagagtatgagtaagatagtgtttttcaaaacatataaatctaaaattgatggatgagatatacagctattaatttcgaaaatatattttaatctgataactttaaacatggatttttgatggtggtttaacgttttaaaaaaagattttgttattgtagtatatgataatattaaaagatggatataaagaatttgctgactgcatgtactattttttacattactacattggctacggcagatatacctactccgccaccaacgggtcatgtgacaagggagaatatcttgataagaggcataatcaatgttgtaatcggtgtccacctggagaatttgccaaggttagatgtaatggtaacgataacacaaaatgtgaacgctgcccacctcatacatataccacaatcccaattattctaatggatgtcatcaatgtagaaaatgcccaacaggatcatttgataaggtaaagtgtaccggaacacagaacagtaaatgttcgtgtcttcctggttggtattgcgctactgattcttcacagactgaagattgttgaaattgtataccaaaaaggagatgtccatgcggatactttggtggaatagatgaacaaggaaatcctatttgtaaatcgtgttgtgttggtgaatattgcgactacctacgtaattatagacttgatccatttcctccatgcaaactatctaaatgtaattaattatgattttgatgataatgttaccatacattatatcgctacttggttagtgtattattcagtatgaagacctattaataattacttatcttttgacgatcttgttataattataatataaaaatacttatggcatagtaactcataattgctgacgcgataaattcgtaataatctgttttgttcaaaggaatctacaggcataaaaataaaaatataatttataatatactcttacaacgccatcatgaataacagcagtgaattgattgctgttattaatggatttagaaatagtggacgattttgtgatattaatatagttattaatgatgaaaggataaacgctcataaactcatcctatctggagcctccgaatatttttccattctgttttccaataattttatcgattctaatgaatacgaagttaatctaagtcatttagattatcaaagtgttaacgatttgatcgattacatttatgggatacctttgagcctaactaacgataacgtgaaatatattctttcaaccgctgattttttacaaattggatctgccattacggagtgtgaaaattacatacttaaaaatctttgttctaaaaactgtatcgatttctacatatacgctgataaatataataacaagaaaatagaatcagcgtcgtttaacacaatattacaaaatattttgagactcatcaacgatgaaaactttaaatacttaacagaggaatcaatgataaaaattttaagcgatgatatgttaaatataaaaaatgaggatttcgccccactaattctcattaaatggttagagagtactcaacaatcatgcaccgtcgagttacttaaatgcctcagaatatcattgctttccccacaagttataaaatcactttatagtcatcgactggttagttcaatctacgaatgtataacattcttaaacaatatagcattcttggatgaatcatttcctagataccatagcatcgagttgatatctatcggtataagtaattcgcgtgataaaatttccataaactgctacaatcataaaaaaaatacatgggaaatgatatcttcacgtagatataggtgtagtttcgcagtggccgtcctggataatattatttatatgatgggtggatatgatcagtccccgtatagaagttcaaaggttatagcgtacaatacatgtacaaattcttggatatatgatataccagagctaaaatatcctcgttctaattgtgggggactggctgatgacgaatacatttattgtataggcggcatacgcgatcaggattcatcgttgacatctagtattgataaatggaagccatcaaaaccatattggcagaagtatgctaaaatgcgcgaaccaaaatgtgatatgggggttgcgatgttaaacggattaatatatgttataggtggaatcgttaaaggtgacacgtgtaccgacgcactagagagtttatcagaagatggatggatgaagcatcaacgtcttccaataaaaatgtccaatatgtcgacgattgttcatgatggcaagatttatatatctggaggttacaacaatagtagtgtagttaatgtaatatcgaatctagtccttagctataatccgatatatgatgaatggaccaaattatcatcattaaacattcctagaattaatcccgctctatggtcagcgcataataaattatatgtaggaggaggaatatctgatgatgttcgaactaatacatctgaaacatacgataaagaaaaagattgttggacattggataatggtcacgtgttaccacgcaattatataatgtataaatgcgaaccgattaaacataaatatccattggaaaaaacacagtacacgaatgattttctaaagtatttggaaagttttataggtagttgatagaacaaaatacataattttgtaaaaataaatcactttttatactaatatgacacgattaccaatacttttgttactaatatcattagtatacgctacaccttttcctcagacatctaaaaaaataggtgatgatgcaactctatcatgtaatcgaaataatacaaatgactacgttgttatgagtgcttggtataaggagcccaattccattattcttttagctgctaaaagcgacgtcttgtattttgataattataccaaggataaaatatcttacgactctccatacgatgatctagttacaactatcacaattaaatcattgactgctagagatgccggtacttatgtatgtgcattctttatgacatcgcctacaaatgacactgataaagtagattatgaagaatactccacagagttgattgtaaatacagatagtgaatcgactatagacataatactatctggatctacacattcaccagaaactagttctgagaaacctgattatatagataattctaattgctcgtcggtattcgaaatcgcgactccggaaccaattactgataatgtagaagatcatacagacaccgtcacatacactagtgatagcattaatacagtaagtgcaacatctggagaatccacaacagacgagactccggaaccaattactgataaagaagaagatcatacagtcacagacactgtctcatacactacagtaagtacatcatctggaattgtcactactaaatcaaccaccgatgatgcggatctttatgatacgtacaatgataatgatacagtaccatcaactactgtaggtagtagtacaacctctattagtaattataaaaccaaggactttgtagaaatatttggtattaccgcattaattatattgtcggccgtggcaatattctgtattacgtattatatatgtaataaacgttcacgtaaatacaaaacagagaacaaagtctagatttttgacttacataaatgtctgggatagtaaaatctatcatattgagcggaccatctggttcaggaaagacagccatagccaaaagactatgggaatatatttggatttgtggtgtcccataccactagatttcctcgtcctatggaacgagaaggtgtcgattaccattacgttaacagagaggccatctggaagggaatagccgccggaaactttctagaacatactgagtttttaggaaatatttacggaacttctaaaactgctgtgaatacagcggctattaataatcgtatttgtgtgatggatttaaacatcgacggtgttagaagttttaaaaatacttacctaatgccttactcggtgtatataagacctacctctcttaaaatggttgagaccaagcttcgttgtagaaacactgaagctaacgatgagattcatcgtcgcgtgatattggcaaaaacggatatggatgaggccaacgaagcaggtctattcgacactattattattgaagatgatgtgaatttagcatatagtaagttaattcagatactacaggaccgtattagaatgtattttaacactaattaaagacttaagacttaaaacttgataattaataatataactcgtttttatatgtggctatttcaacgtctaatgtattagttaaatattaaaacttaccacgtaaaacttaaaatttaaaatgatatttcattgacagatagatcacacattatgaactttcaaggacttgtgttaactgacaattgcaaaaatcaatgggtcgttggaccattaataggaaaaggtggatttggtagtatttatactactaatgacaataattatgtagtaaaaatagagcccaaagctaacggatcattatttaccgaacaggcattttatactagagtacttaaaccatccgttatcgaagaatggaaaaaatctcacaatataaagcacgtaggtcttatcacgtgcaaggcatttggtctatacaaatccattaatgtggaatatagattcttggtaattaatagattaggtgtagatctagatgcggtgatcagagccaataataatagattaccaaaaaggtcggtgatgttgatcggaatcgaaatcttaaataccatacaatttatgcacgagcaaggatattctcacggagatattaaagcgagtaatatagtcttggatcaaatagataagaataaattatatctagtggattacggattggtttctaaattcatgtctaatggcgaacatgttccatttataagaaatccaaataaaatggataacggtactctagaatttacacctatagattcgcataaaggatacgttgtatctagacgtggagatctagaaacacttggatattgtatgattagatggttgggaggtatcttgccatggactaagatatctgaaacaaagaattgtgcattagtaagtgccacaaaacagaaatatgttaacaatactgcgactttgttaatgaccagtttgcaatatgcacctagagaattgctgcaatatattaccatggtaaactctttgacatattttgaggaacccaattacgacgagtttcggcacatattaatgcagggtgtatattattaagtgtggtgtttggtcgatgtaaaatttttgtcgataaaaattaaaaaataacttaatttattattgatctcgtgtgtacaaccgaaatcatggcgatgttttacgcacacgctctcggtgggtacgacgagaatcttcatgcctttcctggaatatcatcgactgttgccaatgatgtcaggaaatattctgttgtgtcagtttataataacaagtatgacattgtaaaagacaaatatatgtggtgttacagtcaggtgaacaagagatatattggagcactgctgcctatgtttgagtgcaatgaatatctacaaattggagatccgatccatgatcaagaaggaaatcaaatctctatcatcacatatcgccacaaaaactactatgctctaagcggaatcgggtacgagagtctagacttgtgtttggaaggagtagggattcatcatcacgtacttgaaacaggaaacgctgtatatggaaaagttcaacatgattattctactatcaaagagaaggccaaagaaatgagtacacttagtccaggacctataattgattaccacgtctggataggagattgtatctgtcaagttactgctgtggacgtacatggaaaggaaattatgagaatgagattcaaaaagggtgcggtgcttccgatcccaaatctggtaaaagttaaacttggggagaatgatacagaaaatctttcttctactatatcggcggcaccatcgaggtaaccacctctctggaagacagcgtgaataatgtactcatgaaacgtttggaaactatacgccatatgtggtctgttgtatatgatcattttgatattgtgaatggtaaagaatgctgttatgtgcatacgcattcatctaatcaaaatcctataccgagtactgtaaaaacaaatttgtacatgaagactatgggatcatgcattcaaatggattccatggaagctctagagtatcttagcgaactgaaggaatcaggtggatggagtcccagaccagaaatgcaggaatttgaatatccagatggagtggaagacactgaatcaattgagagattggtagaggagttcttcaatagatcagaacttcaggctggtaaattagtcaaatttggtaattctattaattgttaaacatacatctgtttcagctaagcaactaagaacacgtatacggcagcagcttcctttatactctcatcttttaccaacacaaagggtggatatttgttcattggagttgataataatacacacaaagtatttggattcacggtgggttacgactacctcagactggtagagaatgatatagaaaagcatatcaaaagactttgtgttgtgcatttctgtgagaagaaagaggacatcaagtacgcgtgtcgattcatcaaggtatataaacctggggatgaggctacctcgacatacgtgtgcgctatcaaagtggaaagatgctgttgtgctgtgtttgcagattggccagaatcatggtatatggatactaatggtatcaagaagtattctccagatgaatgggtgtcacatataaaattttaattaatgtaactatagagaacaaataataggttgtaatatcatatagacaataactaacaattaattagtaactgttatctcttttttaactaaccaactaactatatacctattaatacatcgtaattatagttcttaacatctattaatcattgattcgcttctttaattttttataaactaacattgttaattgaaaagggataacatgttacagaatataaattatatatggatttttttaaaaaggaaatacttgactggagtgtatatttatctcttcattatatagcacgcgtgtgttccaattcttccacatcccatataatacaggattataatctcattcgaacatacgagaaagtggataaaacaatagttgattttttatctaggttgccaaatttattccatattttagaatatggggaaaatattctacatatttattctatggatgatgctaatacgaatattataattttttttctagatagagtattaaatattaataagaacgggtcatttatacacaatctcaggttatcatcatccattaatataaaagaatatgtatatcaattagttaataatgatcatccagataataggataagactaatgcttgaaaatggacgtagaacaagacattttttgtcctatatatcagatacagttaatatctatatatgtattttaataaatcatggattttatatagatgccgaagacagttacggttgtacattattacatagatgtatatatcactataagaaatcagaatcagaatcatacaatgaattaattaagatattgttaaataatggatcagatgtagataaaaaagatacgtacggaaacacaccttttatcctattatgtaaacacgatatcaacaacgtggaattgtttgagatatgtttagagaatgctaatatagactctgtagactttaatagatatacacctcttcattatgtctcatgtcgtaataaatatgattttgtaaagttattaatttctaaaggagcaaatgttaatgcgcgtaataaattcggaactactccattttattgtggaattatacacggtatctcgcttataaaactatatttggaatcagacacagagttagaaatagataatgaacatatagttcgtcatttaataatttttgatgctgttgaatctttagattatctattatccagaggagttattgatattaactatcgtactatatacaacgaaacatctatttacgacgctgtcagttataatgcgtataatacgttggtctatctattaaacagaaatggtgattttgagacgattactactagtggatgtacatgtatttcggaagcagtcgcaaacaacaacaaaataataatggaagtactattgtctaaacgaccatctttgaaaattatgatacagtctatgatagcaattactaaaaataaacaacataatgcagatttattgaaaatgtgtataaaatatactgcgtgtatgaccgattatgatactcttatagatgtacagtcgctacagcaatataaatggtatattttaaaatgtttcgatgaaatagatatcatgaagagatgttatataaaaaataaaactgtattccaattagttttttgtatcaaagacattaatactttaatgagatacggtaaacatccttctttcgtgaagtgcactagtctcgacgtatacggaagtcgtgtacgtaatatcatagcatctattagatatcgtcagagattaattagtctattatccaagaagctggatgcgggagataaatggtcgtgttttcctaacgaaataaaatataaaatattggaaaactttaacgataacgaactgtccacatatctaaaaatcttataaacactattaaaatataaaatctaagtaggataaaatcacactacatcattgtttccttttagtgctcgacagtgtatactatttttaacactcataaataaaaatgaaaacgatttccgttgttacgttgttatgcgtactacctgctgttgtttattcaacatgtactgtacccactatgaataacgctaaattaacgtctaccgaaacatcgtttaataataaccagaaagttacgtttacatgtgatcagggatatcattcttcggatccaaatgctgtctgcgaaacagataaatggaaatacgaaaatccatgcaaaaaaatgtgcacagtttctgattacatctctgaactatataataaaccgctatacgaagtgaattccaccatgacactaagttgcaacggcgaaacaaaatattttcgttgcgaagaaaaaaatggaaatacttcttggaatgatactgttacgtgtcctaatgcggaatgtcaacctcttcaattagaacacggatcgtgtcaaccagttaaagaaaaatactcatttggggaatatatgactatcaactgtgatgttggatatgaggttattggtgcttcgtacataagttgtacagctaattcttggaatgttattccatcatgtcaacaaaaatgtgatataccgtctctatctaatggattaatttccggatctacattttctatcggtggcgttatacatcttagttgtaaaagtggttttatactaacgggatctccatcatccacatgtatcgacggtaaatggaatcccgtactcccaatatgtgtacgaactaacgaagaatttgatccagtggatgatggtcccgacgatgagacagatttgagcaaactctcgaaagacgttgtacaatatgaacaagaaatagaatcgttagaagcaacttatcatataatcatagtggcgttaacaattatgggcgtcatatttttaatctccgttatagtattagtttgttcctgtgacaaaaataatgaccaatataagttccataaattgctaccgtaaatataaatccgttaaaataattaataattaataattaataattaataacgaacaagtatcaaaagattaaagacttatagctagaatcaattgagatgtcttcttcagtggatgttgatatctacgatgccgttagagcatttttactcaggcactattataacaagagatttattgtgtatggaagaagtaacgccatattacataatatatacaggctatttacaagatgcgccgttataccgttcgatgatatagtacgtactatgccaaatgaatcacgtgttaaacaatgggtgatggatacacttaatggtataatgatgaatgaacgcgatgtttctgtaagcgttggcaccggaatactattcatggaaatgtttttcgattacaataaaaatagtatcaacaatcaactaatgtatgatataattaatagcgtatctataattctagctaatgagagatatagaagcgcttttaacgacgatggtatatacatccgtagaaatatgattaacaagttgtacggatacgcatctctaactactattggcacgatcgctggaggtgtttgttattatctgttgatgcatctagttagtttgtataaataattatttcaatatactagttaaaattttaagattttaaatgtataaaaaactaataacgtttttatttgtaataggtgcattagcatcctattcgaataatgagtacactccgtttaataaactgagtgtaaaactctatatagatggagtagataatatagaaaattcatatactgatgataataatgaattggtgttaaattttaaagagtacacaatttctattattacagagtcatgcgacgtcggatttgattccatagatatagatgttataaacgactataaaattattgatatgtataccattgactcgtctactattcaacgcagaggtcacacgtgtagaatatctaccaaattatcatgccattatgataagtacccttatattcacaaatatgatggtgatgagcgacaatattctattactgcagagggaaaatgctataaaggaataaaatatgaaataagtatgatcaacgatgatactctattgagaaaacatactcttaaaattggatctacttatatatttgatcgtcatggacatagtaatacatattattcaaaatatgatttttaaaaatttaaaatatattatcacttcagtgacagtagtcaaataacaagctggccgcataacttcgtataatgtatgctatacgaagttatgtcgacgatgttcccaatttcaaggacaaaatggccagagttatcaagagaaaatttaataaacagtctcaatcttatttaactaaatttctcggtagcacatcaaatgatgttaccacttttcttagcatgcttaacttgactaaatattcataactaatttttattaatgatacaaaaacgaaataaaactgcatattatacactggttaacgcccttataggctctaaccattttcaagatgaggtccctgattatagtccttctgttcccctctatcatctactccatgtctattagacgatgtgagaagactgaagaggaaacatggggattgaaaatagggttgtgtataattgccaaagatttctatcccgaaagaactgattgcagtgttcatctcccaactgcaagtgaaggattgataactgaaggcaatggattcagggatatacgaaacaccgataaattataaaaaaagcaatgtgtccgctgtttccgttaataatactattttcgtaactggcggattattcataaataactctaatagcacgatcgtggttaacaatatggaaaaacttgacatttataaagacaaacaatggtcgattatagaaatgcctatggctagggtatatcacggcatcgactcgacatttggaatgttatattttgccggaggtctatccgttaccgaacaatatggtaatttagagaaaaacaacgagatatcttgttacaatcctagaacgaataagtggtttgatatttcatatactatttataagatatccatatcatcattgtgtaaactaaataacgtcttctatgtatttagtaaggacattggatatgtggaaaagtatgatggtgcatggaagttagtacatgatcgtctccccgctataaaggcattatcaacttctccttattgattgaaaatgaaaatataaatagtttttatgtatagcagtattaccctatagttttattgcttactactaacatggatacagatacagatacagatacagatacagatacagatacagatacagatacagatgttacaaatgtagaagatatcataaatgaaatagatagagagaaagaagaaatactaaaaaatgtagaaattgaaaataataaaaacattaacaagaatcatccaagtggatatattagagaagcactcgttattaatacaagtagtaatagtgattccattgataaagaagttatagaatgtatcagtcacgatgtaggaatatagatcatatctactaatttttataatcaatacaaaacataaaaaacaactcgttattacatagcaggcatggaatccttcaagtattgttttgataacgatggcaagaaatggattatcggaaatactttatattctggtaattcaatactctataaggtcagaaaaaatttcactagttcgttctacaattacgtaatgaagatagatcacaaatcacacaagccattgttgtctgaaatacgattctatatatctgtattggatcctttgactatcgacaactggacacgggaacgtggtataaagtatttggctattccagatctgtatggaattggagaaaccgatgattatatgttcttcgttataaagaatttgggaagagtattcgccccaaaggatactgaatcagtcttcgaagcatgtgtcactatgataaacacgttagagtttatacactctcgaggatttacccatggaaaaatagaaccgaggaatatactgattagaaataaacgtctttcactaattgactattctagaactaacaaactatacaagagtggaaactcacatatagattacaacgaggacatgataacttcaggaaatatcaattatatgtgtgtagacaatcatcttggagcaacagtttcaagacgaggagatttagaaatgttgggatattgcatgatagaatggttcggtggcaaacttccatggaaaaacgaaagtagtataaaagtaataaaacaaaaaaaagaatataaaaaatttatagctactttctttgaggactgttttcctgaaggaaatgaacctctggaattagttagatatatagaattagtatacacgttagattattctcaaactcctaattatgacagactacgtagactgtttatacaagattgaaattatattctttttttatagagtgtggtagtgttacggatatctaatattaatattagactatctctatcgcgctacacgaccaatatcgattactatgaatatcttctatgaaaggagagaatgtattcatttctccagcgtcaatctcgtcagtattgacaatactgtattatggagctaatggatccactgctgaacagctatcaaaatatgtagaaacggaggagaacacggataaggttagcgctcagaatatctcattcaaatccataaataaagtatatgggcgatattctgccgtgtttaaagatttctttttgggaaaaattggcgataagtttcaaactgttgacttcactgattgtcgcactatagatgcaatcaacaagtgtgtagatatctttactgaggggaaaatcaatccactattggatgaaccattgtctcctagcaattagtgccgtatactttaaagcaaaatggttgacgccattcgaaaaggaatttaccagtgattatcccttttacgtatcaccaacggaaatggtagatgtaagtatgatgtctatgtacggcgagctatttaatcacgcatctgtaaaggaatcattcggcaacttttcaatcatagaactgccatatgttggagatactagtatgatggtcattcttccagacaagattgatggattagaatccatagaacaaaatctaacagatacaaattttaagaaatggtgtaactctctggatgctatgtttatagatgttcacattcccaagtttaaggtaacaggctcgtataatctggtggatactctagtaaaatccgctgatggaaacacagtgaatgctagattgtccagcgtgtccccaggacaaggtaaggactctcccgcgatcactcgtgaagaagctctggctatgatcaaagactgtgaggtgtctatcgacatcagatgtagcgaagaagagaaagacagcgacatcaagacccatccagtactcgggtctaacatctctcataagaaagtgagttacgaagatatcatcggttcaacgatcgtcgatacaaaatgtgtcaagaatctagagtttagcgttcgtatcggagacatgtgcaaggaatcatctgaacttgaggtcaaggatggattcaagtatgtcgacggatcggcatctgaaggtgcaaccgatgatacttcactcatcgattcaacaaaactcaaagcgtgtgtctga

SEQ ID NO: 19 - DNA, 819 bp, synthetic construct
  misc_feature 1..819: note = B8R
  source 1..819: mol_type = other DNA
atgagatatattataattctcgcagttttgttcattaatagtatacacgctaaaataactagttataagtttgaatccgtcaattttgattccaaaattgaatggactggggatggtctatacaatatatcccttaaaaattatggcatcaagacgtggcaaacaatgtatacaaatgtaccagaaggaacatacgacatatccgcatttccaaagaatgatttcgtatctttctgggttaaatttgaacaaggcgattataaagtggaagagtattgtacgggactatgcgtcgaagtaaaaattggaccaccgactgtaacattgactgaatacgacgaccatatcaatttgtacatcgagcatccgtatgctactagaggtagcaaaaagattcctatttacaaacgcggtgacatgtgtgatatctacttgttgtatacggctaacttcacattcggagattctgaagaaccagtaacatatgatatcgatgactacgattgcacgtctacaggttgcagcatagactttgccacaacagaaaaagtgtgcgtgacagcacagggagccacagaagggtttctcgaaaaaattactccatggagttcggaagtatgtctgacacctaaaaagaatgtatatacatgtgcaattagatccaaagaagatgttcccaatttcaaggacaaaatggccagagttatcaagagaaaatttaataaacagtctcaatcttatttaactaaatttctcggtagcacatcaaatgatgttaccacttttcttagcatgcttaacttgactaaatattcataa

SEQ ID NO: 20 - DNA, 669 bp, synthetic construct
  misc_feature 1..669: note = B14R
  source 1..669: mol_type = other DNA
atgaaccattgtctcctagcaattagtgccgtatactttaaagcaaaatggttgacgccattcgaaaaggaatttaccagtgattatcccttttacgtatcaccaacggaaatggtagatgtaagtatgatgtctatgtacggcgagctatttaatcacgcatctgtaaaggaatcattcggcaacttttcaatcatagaactgccatatgttggagatactagtatgatggtcattcttccagacaagattgatggattagaatccatagaacaaaatctaacagatacaaattttaagaaatggtgtaactctctggatgctatgtttatagatgttcacattcccaagtttaaggtaacaggctcgtataatctggtggatactctagtaaagtcaggactgacagaggtgttcggttcaactggagattatagcaatatgtgtaatttagatgtgagtgtcgacgctatgatccacaaaacgtatatagatgtcaatgaagagtatacagaagcagctgcagcaacttgtgcactggtgtcagactgtgcatcaacaattacaaatgagttctgtgtagatcatccgttcatctatgtgattaggcatgttgatggaaaaattcttttcgttggtagatattgctctccaacaactaattgttaa

SEQ ID NO: 21 - DNA, 450 bp, synthetic construct
  misc_feature 1..450: note = B15R
  source 1..450: mol_type = other DNA
atgacagccaactttagtacccacgtcttttcaccacagcactgtggatgtgacagactgaccagtattgatgacgtcaaacaatgtttgactgaatatatttattggtcgtcctatgcataccgcaacaggcaatgcgctggacagttgtattccacactcctctcttttagagatgatgcggaattagtgttcatcgacattcgcgagctggtaaaaaatatgccgtgggatgatgtcaaagattgtacagaaatcatccgttgttatataccggatgagcaaaaaaccatcagagagatttcggccatcatcggactttgtgcatatgctgctacttactggggaggtgaagaccatcccactagtaacagtctgaacgcattgtttgtgatgcttgagatgctcaattacgtggattataacatcatattccggcgtatgaattga

SEQ ID NO: 22 - DNA, 873 bp, synthetic construct
  misc_feature 1..873: note = B16R
  source 1..873: mol_type = other DNA
atggagttagaaaacgagccagtaatcttaccatgtcctcaaataaatacgctatcatccggatataatatattagatattttatgggaaaaacgaggagcggataatgatagaattataccgatagataatggtagcaatatgctaattctgaacccgacacaatcagactctggtatttatatatgcattaccacgaacgaaacctactgtgacatgatgtcgttaaatttgacaatcgtgtctgtctcagaatcaaatatagattttatctcgtatccacaaatagtaaatgagagatctactggcgaaatggtatgtcccaatattaatgcatttattgctagtaacgtaaacgcagatattatatggagcggacatcgacgccttagaaataagagacttaaacaacggacacctggaattattaccatagaagatgttagaaaaaatgatgctggttattatacatgtgttttagaatatatatacggtggcaaaacatataacgtaaccagaattgtaaaattagaggtacgggataaaataatacatcctactatgcaattaccagaaggtgttgtaacttcaataggtagtaatttgactattgcgtgtagagtatcgttgagacctcccacaacggatgcagacgtcttttggataagtaatggtatgtattacgaagaagatgatggggacggagacggtagaataagtgtagcaaataaaatctatatgaccgataagagacgtgttattacatcccggttaaacattaatcctgtcaaggaagaagatgctacaacgtttacgtgtatggcgtttactattcctagcatcagcaaaacagttactgttagtataacgtga

SEQ ID NO: 23 - DNA, 1023 bp, synthetic construct
  misc_feature 1..1023: note = B16R B17L
  source 1..1023: mol_type = other DNA
atgtctagaaagtttatgcaggtgtatgaatatgacagagagcaatatctcgatgagttcattgaagacagatataacgatagttttatcactagtccagaatactatagcgcggaaaaatacatgtgtagatatactacactaaatcacaattgtgtaaacgtacgacgatgtgcgttagattccaagttattacatgatatcataaccaattgtaaaatatataacaatatagaattagttagggcgacaaaatttgtttattatctggatctgataaaatgtaattgggtatctaaggtaggtgattcggttctatatcccgttatatttataacacatacaagtactagaaatttagataaagtctctgtaaaaacatacaagggcgttaaagtaaaaaaacttaatagatgcgcggatcatgctattgtaattaatccattcgtcaagtttaaactaacgttgccgaacaaaacaagtcatgcaaaggtattggttacattttgtaagttaagaacggatataactccggtagaagctccgcttccgggcaatgttttagtttatacatttcctgacattaataaaagaattcctggatatatacatgtcaacatagaaggatgtatcgatggaatgatttatataaattcttcaaagtttgcgtgtgttttaaaactacatagatcaatgtatcgcattccaccctttcctatagatatctgctcttgttgttcacaatatactaacgatgacatagaaattcccattcatgatttaataaaggatgtggcaatttttaaaaataaggagacggtatattatctaaaattaaataataaaactatagctagatttacgtactttaataatatagatactgcaattacacaagaacacgagtatgtcaaaatagctctaggtatagtctgcaagttaatgattaataatatgcatagtatcgtgggagttaatcatagcaatacgttcgtcaattgcttgttggaagataatgtataa

SEQ ID NO: 24 - DNA, 1725 bp, synthetic construct
  misc_feature 1..1725: note = B18R
  source 1..1725: mol_type = other DNA
atgagtcgtcgtctgatttatgttttaaatatcaaccgcaaatcaactcataaaatacaagagaatgaaatatatacatattttagtcattgcaatatagaccatacttctacagaacttgattttgtagttaaaaactatgatctaaacagacgacaacatgtaactgggtatactgcactacactgctatttgtataataattactttacaaacgatgtactgaagatattattaaatcatgacgtaaatgtaacgatgaaaaccagtagcggacgtatgcctgtttatatattgcttactagatgttgtaatatttcacatgatgtagtgatagatatgatagacaaagataaaaaccacttatcgcatagagactattccaacctactactagagtatataaaatctcgttacatgttattgaaggaagaggatatcgatgagaacatagtatcaactttattagataagggaatcgatcctaactttaaacaagacggatatacagcgttacattattattatttgtgtctcgcacacgtttataaaccaggtgagtgtagaaaaccgataacgataaaaaaggccaagcgaattatttctttgtttatacaacatggagctaatctaaacgcgttagataattgtggtaatacaccattccatttgtatcttagtattgaaatgtgtaataatattcatatgactaaaatgctgttgacttttaatccgaatttcaaaatatgtaataatcatggattaacgcctatactatgttatataacttccgactacatacaacacgatattcttgttatgttaatacatcactatgaaacaaatgttggagaaatgccgatagatgagcgtcgtatgatcgtattcgagtttatcaaaacatattctacacgtcctgcagattcgataacttatttgatgaataggtttaaaaatataaatatttatacccgctatgaaggaaagacattattacacgtagcatgtgaatataataatacacaagtaatagattatcttatacgtatcaacggagatataaatgcgttaaccgacaataacaaacacgctacacaactcattatagataacaaagaaaattccccatataccattaattgtttactgtatatacttagatatattgtagataagaatgtgataagatcgttggtggatcaacttccatctctacctatcttcgatataaaatcatttgagaaattcatatcctactgtatacttttagatgacacattttacgataggcacgttaagaatcgcgattctaaaacgtatcgatacgcattttcaaaatacatgtcgttcgataaatacgatggtataataactaaatgtcacgacgaaacaatgttactcaaactgtccactgttctagacactacactatatgcagttttaagatgtcataattcgagaaagttaagaagatacctcaccgagttaaaaaaatataataacgataagtcctttaaaatatattctaatattatgaatgagagataccttaatgtatattataaagatatgtacgtgtcaaaggtatatgataaactatttcctgttttcacagataaaaattgtctactaacattactaccttcagaaattatatacgaaatattatacatgctgacaattaacgatctttataatatatcgtatccacctaccaaagtatag

SEQ ID NO: 25 - DNA, 1062 bp, synthetic construct
  misc_feature 1..1062: note = B19R
  source 1..1062: mol_type = other DNA
atgacgatgaaaatgatggtacatatatatttcgtatcattatcattattgttattgctattccacagttacgccatagacatcgaaaatgaaatcacagaattcttcaataaaatgagagatactctaccagctaaagactctaaatggttgaatccagcatgtatgttcggaggcacaatgaatgatatggccactctaggagagccattcagtgcaaagtgtcctcctattgaagacagtcttttatcgcacagatataaagactatgtggttaaatgggagaggctagaaaagaatagacggcgacaggtttctaataaacgtgttaaacatggtgatttatggatagccaactatacatctaaattcagtaaccgtaggtatttgtgcaccgtaactacaaagaatggtgactgtgttcagggtatagttagatctcatattaaaaaacctccttcatgcattccaaaaacatatgaactaggtactcatgataagtatggcatagacttatactgtggaattctttacgcaaaacattataataatataacttggtataaagataataaggaaattaatatcgacgacattaagtattcacaaacgggaaaggaattaattattcataatccagagttagaagatagcggaagatacgactgttacgttcattacgacgacgttagaatcaagaatgatatcgtagtatcaagatgtaaaatacttacggttataccgtcacaagaccacaggtttaaactaatactagatccgaaaatcaacgtaacgataggagaacctgccaatataacatgcactgctgtgtcaacgtcattattgattgacgatgtactgattgaatgggaaaatccatccggatggcttataggattcgattttgatgtatactctgttttaactagtagaggcggtatcaccgaggcgaccttgtactttgaaaatgttactgaagaatatataggtaatacatataaatgtcgtggacacaactattattttgaaaaaacccttacaactacagtagtattggagtaa

SEQ ID NO: 26 - DNA, 384 bp, synthetic construct
  misc_feature 1..384: note = B20R
  source 1..384: mol_type = other DNA
atggatgaagatacgcgactatctaggtatttgtatctcaccgatagagaacatataaatgtagactctattaaacagttgtgtaaaatatcagatcctaatgcatgttatagatgtggatgtacggctttacatgagtacttttataattatagatcagtcaacggaaaatacaagtatagatacaacggttactatcaatattattcatctagcgattatgaaaattataatgaatattattatgatgattatgatagaactggtatgaacagcgagagcgatagtgagagtgataatatatcaatcaaaacagaatatgagaatgaatatgaattctatgatgaaacacaagatcaaagtacacaacacaatgacttataa

SEQ ID NO: 27 - DNA, 675 bp, synthetic construct
  misc_feature 1..675: note = C1L
  source 1..675: mol_type = other DNA
atggtgaaaaataataaaataagtaatagctgccgaatgataatgagtactaaccctaataatattctaatgagacatctcaaaaatcttacagatgatgaatttaaatgtattattcatcgatcatctgattttctttatttgtccgatagtgactatactagtataaccaaagaaacattagttagtgagatcgtagaagaatatccggatgattgtaataaaatattagctattatatttttggtgttagataaagacatagatgtagatatagaaactaaactaaagcctaaacccgcagttagatttgccattctagacaagatgactgaggatattaaactaacggatctagtcagacattattttagatacatagaacaagatataccactaggtccgttgttcaaaaaaatagattcgtacagaacaagagccattaataagtattcgaaagagttaggattggctactgaatactttaataagtacggacatttaatgttttatactctccctataccatataacagattcttttgtagaaattcgataggctttttagcggttctatcgcctacgataggacacgtaaaagcattttataaattcatagaatatgtttctatagatgatagacggaaatttaaaaaggaattaatgtcgaaatga

SEQ ID NO: 28 - DNA, 1539 bp, synthetic construct
  misc_feature 1..1539: note = C2L
  source 1..1539: mol_type = other DNA
atggaaagcgtgatattttctatcaatggggaaattatacaagtgaataaggaaattattacggcgtctccgtataatttttttaaacgcattcaggatcaccatctaaaggatgaagcgattatattgaatggtataaactatcacgcgtttgaatcgctattagactatatgcgctggaagaagataaacatcaccataaacaatgtagaaatgatactagttgctgccgtaataattgatgttccgcctgtagtagatctatgtgtaaaaactatgattcataatattaattccacaaattgtataaggatgtttaacttttctaaaagatatggaattaaaaaactatataatgcgtcgatgtcagaaataatcaacaatattactgcggtgacatccgatccagaatttggaaaattatcaaaggatgaactgacaactatcttatcccacgaagacgttaacgtaaatcatgaggatgttacagctatgatattattaaagtggatacataaaaatccaaacgatgtagatatcatcaacattttacatcccaagtttatgactaatactatgcgcaatgctatatcattgttgggattaactatatccaaatctacaaagccagtgacacgaaatggtataaaacataatatagtagtcattaaaaactctgattatatatccacaataacccattactctcctagaacagaatattggacgatagtcggtaatacagatagacaattctataatgcaaatgttttacataattgtctatacattattggcggcatgattaacaatagacatgtttattccgtatcgcgggtagatcttgaaacgaaaaaatggaaaacggttactaatatgtcgtcgttaaaatcagaagttagtacttgtgttaacgatggaaagttatatgtaataggaggattagaattttctatttcaacgggtgtggcagaatatttgaaacacggcacttcgaaatggataagacttccaaacttaattactcctagatattcaggcgcgtcggtattcgtaaacgatgatatatatgtaatgggtggagtttataccacgtatgaaaaatatgtagtattaaacgatgtggaatgtttcactaaaaatcgttggataaaaaagtctcccatgcctagacatcatagtatagtttatgctgtagagtacgacggcgacatctatgtaattactggaattactcacgagactcgtaattatctatacaaatatatagttaaggaagacaaatggatagaattgtacatgtactttaaccatgtaggaaagatgttcgtgtgttcttgcggtgattatatcttaattatagcagatgcaaaatacgaatattatccaaaatcaaatacttggaatttgttcgatatgtcaactcgtaatatcgaatattatgatatgtttactaaagatgagactccaaagtgtaacgtaactcataagtcactgccatcgtttttgagcaactgtgaaaaacaatttctacaatag

SEQ ID NO: 29 - DNA, 681 bp, synthetic construct
  misc_feature 1..681: note = F1L
  source 1..681: mol_type = other DNA
atgttgtcgatgtttatgtgtaataatatcgtagattatgtagatgatatagataatggtatagtacaggatatagaagatgaggctagcaataatgttgatcacgactatgtatatccacttccagaaaatatggtatatagatttgacaagtccactaacatactcgattatctatcaacggaacgggaccatgtaatgatggctgttcgatactatatgagtaaacaacgtttagacgacttgtatagacagttgcccacaaagactagatcatatatagatattatcaacatatattgtgataaagttagtaatgattataatagggacatgaatatcatgtatgatatggcatctacaaaatcatttacagtttatgacataaataacgaagttaatactatactaatggataacaaggggttgggtgtaagattggcgacaatttcatttataaccgaattgggtagacgatgtatgaatccagtaaaaactataaaaatgtttactctactatcgcatactatatgcgatgattgttttgtagattatataacggacatttcaccaccagataataccatccctaacactagcacgcgtgaatatctaaagcttattggcatcacagctatcatgtttgctacatataaaactctcaaatacatgataggataa

SEQ ID NO: 30 - DNA, 444 bp, synthetic construct
  misc_feature 1..444: note = F2L
  source 1..444: mol_type = other DNA
atgttcaacatgaatattaactcaccagttagatttgttaaggaaactaacagagctaaatctcctactaggcaatcgccgggtgctgccggatatgatttgtatagcgcttacgattatactatccctccaggagaaagacagttaattaagacagatattagtatgtccatgcctaagatttgctatggtagaatagctcctaggtctggtctgtcactaaaaggcattgatataggaggtggtgtaatagacgaagattataggggaaacataggagtcattcttattaataatggaaaatgtacgtttaatgtaaatactggagatagaatagctcagctaatctatcaacgtatatattatccagaactggaagaagtacaatctctagatagtacaaatagaggagatcaagggtttggatcaacaggacttagataa

SEQ ID NO: 31 - DNA, 1443 bp, synthetic construct
  misc_feature 1..1443: note = F3L
  source 1..1443: mol_type = other DNA
atgccgatatttgtcaatactgtgtactgtaagaatatattagcattgtctatgactaagaaattcaaaacaattattgatgctataggtggcaatataatagtcaattctacgatattgaaaaagttatctccttactttcgcacacatttacgtcaaaaatacacgaaaaataaagatccagttacaagggtttgtctagaccttgacattcacagtttaacttctatagttatttactcgtatactggaaaggtatatatagatagtcataacgtcgtcaatttattacgtgcttctatattaacctctgtagaatttatcatctacacttgtataaactttatcttacgagattttagaaaggaatattgtgtcgagtgttacatgatgggtatagaatacggactatccaatctcttatgtcatactaaaaactttattgccaaacactttttggaactggaagatgacatcatagacaattttgattatctatctatgaaacttattctagaaagcgatgaactaaatgttccagatgaggattatgtagttgattttgtcattaagtggtatataaagcgaagaaataaattaggaaatctgctactccttatcaaaaatgtaatcaggtcaaattatctttctcccagaggtataaataatgtaaaatggatactagactgtaccaaaatatttcattgtgataaacaaccacgcaaatcatacaagtatccattcatagagtatcctatgaacatggatcaaattatagatatattccatatgtgtacaagtactcatgttggagaagtagtatatctcatcggtggatggatgaacaatgaaatacataacaatgctatagctgtaaattatatatcaaacaattggattccaattcctccgatgaatagccccagactgtatgctagcgggatacccgctaacaataaattatacgtagtaggaggtctaccaaatcccacatctgttgagcgttggttccacggggatgctgcttgggttaatatgccgagtcttctgaaacctagatgtaatccagcagtggcatccataaacaatgttatatacgtaatgggaggacattctgaaactgatacaactacagaatatttgctacccaatcatgatcagtggcagtttggaccatccacttattatcctcattataaatcatgcgcgttagtgttcggtagaaggttattcttggttggtagaaatgcggaattttattgtgaatccagcaatacatggactctgatagatgatcctatttatccgagggataatccagaattgatcatagtggataataaactgctattgataggaggattttatcgtggatcgtatatagatactatagaagtgtacaatcatcacacttattcatggaatatatgggatggtaaataa

SEQ ID NO: 32 - DNA, 855 bp, synthetic construct
  misc_feature 1..855: note = K1L
  source 1..855: mol_type = other DNA
atggatctgtcacgaattaatacttggaagtctaagcagctgaaaagctttctctctagtaaagatacatttaaggcggatgtccatggacatagtgccttgtattatgcaatagctgataataacgtgcgtctagtatgtacgttgttgaacgctggagcattgaaaaatcttctagagaatgaatttccattacatcaggcagccacattagaagataccaaaatagtaaagattttgctattcagtggaatggatgattcacaatttgatgacaaaggaaacaccgcattgtattatgcggttgatagtggtaacatgcaaacggtgaaactgtttgttaagaaaaattggagactgatgttctatgggaaaactggatggaaaacttcattttatcatgccgtcatgcttaatgatgtaagtattgtatcatactttctttcagaaataccatctacttttgatctggctattctccttagttgtattcacaccactataaaaaatggacacgtggatatgatgattctcttgctcgactatatgacgtcgacaaacaccaataattcccttctcttcattccggacattaaattggctatagataataaagacattgagatgttacaggctctgttcaaatacgacattaatatctactctgttaatctggaaaatgtactattggatgatgccgaaataactaagatgattatagaaaagcatgttgaatacaagtctgactcctatacaaaagatctcgatatcgtcaagaataataaattggatgaaataattagcaaaaacaaggaactcagactcatgtacgtcaattgtgtaaagaaaaactaa

SEQ ID NO: 33 - DNA, 1110 bp, synthetic construct
  misc_feature 1..1110: note = K2L
  source 1..1110: mol_type = other DNA
atgattgcgttattgatactatcgttaacgtgttcagtgtctacctatcgtctgcaaggatttaccaatgccggtatagtagcgtataaaaatattcaagatgataatattgtcttctcaccgtttggttattcgttttctatgtttatgtcgctattgcctgcatcaggtaatactagaatagaattattgaagactatggatttgagaaaaagagatctgggtccagcatttacagaattaatatcaggattagctaagctgaaaacatctaaatatacgtacactgatctaacttatcaaagtttcgtagataatactgtgtgcattaaaccgttgtattatcaacaatatcatagattcggcctatatagattaaactttagacgagatgcggttaataaaattaattctatagtagaacgtagatccggtatgtctaatgtagtagattctaatatgctcgacaataatactctatgggcaatcattaatactatatattttaaaggtacatggcaatatccgtttgatatcactaaaacacgcaatgctagttttactaataagtacggtacgaaaacggttcccatgatgaacgtagttactaaattgcaaggaaatacaatcacaatcgatgacgaagaatatgatatggtgcgccttccgtataaggatgctaatattagtatgtacctggcaataggtgataatatgacccatttcacagattctattacggctgcaaaattagactattggtcgtttcaattagggaataaagtgtacaatcttaaactccctaaattttctatcgaaaataagagggatattaagtcgatagccgaaatgatggctcctagtatgtttaatccagataatgcgtcgtttaaacatatgactagggacccattatatatttataaaatgtttcagaatgcaaagatagatgtcgacgaacaaggaactgtagcagaggcatctactatcatggtagctacggcgagatcatctcctgaaaaactggaatttaatacaccatttgtgttcatcattagacatgatattactggatttatattgtttatgggtaaggtagaatctccttaa

SEQ ID NO: 34 - DNA, 267 bp, synthetic construct
  misc_feature 1..267: note = K3L
  source 1..267: mol_type = other DNA
atgcttgcattttgttattcgttgcccaatgcgggcgatgtaataaagggcagagtatacgagaaggattatgctctatacatttatctttttgactatcctcactctgaagctatcttggcagagagtgttaagatgcatatggatagatatgttgaatatagggataaactggtagggaaaactgtaaaagttaaagtgattagagttgattatacaaaaggatatatagatgtcaattacaaaaggatgtgtagacatcaataa

SEQ ID NO: 35 - DNA, 1275 bp, synthetic construct
  misc_feature 1..1275: note = K4L
  source 1..1275: mol_type = other DNA
atgaatccggataatacaatcgcagtgattacagagactattcctataggtatgcaatttgataaagtatatttgtctacatttaacatgtggagggaaattctatccaataccacaaaaacactagatatatcatctttttattggagtttatcggatgaagtgggtacgaatttcggcacgataatattaaacgagattgtacaattacccaaaagaggagtacgagttagagtagccgtcaataaatctaacaaaccattaaaggatgttgaaagactacaaatggccggagttgaagtacgatacatagatattacaaatatcctaggaggagttcttcatacaaaattttggatatctgataatacacatatttatttaggaagcgctaacatggattggagatcactaactcaggtcaaagaattgggtattgcgatcttcaataataggaacttggcagcggatctcactcaaatttttgaggtatactggtatcttggagttaacaatctaccatataattggaaaaacttttatccgtcgtattataatacagatcatcctcttagtattaacgtaagtggtgttccacactctgtatttattgcttctgcaccgcaacaactatgtactatggaaagaaccaatgatttaaccgctttattgtcatgtattagaaatgcgagtaaattcgtttatgtatctgttatgaactttatccctattatttattcgaaggcgggtaaaattttgttttggccttatatagaagatgaattaagaagatccgctatagacagacaagtatccgttaagctattgattagttgctggcaacgatcttcgtttatcatgagaaactttttaagatctatcgctatgctaaaatctaaaaacatagatatagaagtaaagctatttattgtaccagatgctgatcctcccattccgtattctagggtaaaccatgccaaatatatggtaaccgataaaacggcctatataggtacctcaaattggacaggaaattactttacggatacatgtggagcatctattaatattacaccggatgatggattaggtcttcgtcaacaattggaagatatttttatgcgtgattggaattcaaaatacagctatgaattgtacgatactagtcctactaaaaggtgtaaactattaaaaaatatgaaacaatgtacaaatgatatatactgcgatgagatacaaccggaaaaagaaattcctgaatattctcttgaataa

SEQ ID NO: 36 - DNA, 411 bp, synthetic construct
  misc_feature 1..411: note = K5L
  source 1..411: mol_type = other DNA
atgggagcaacaatttctatactagcctcttacgataatccaaacttgtttacagcaatgattctaatgtctcctctagttaatgcagatgctgtttcaagactgaatctgctagctgccaaacttatgggaaccatcacaccaaatgcgccagtcggaaagctatgtccagaatcagtatctagagatatggataaagtttataaataccaatacgacccattaatcaatcatgaaaaaattaaggctggatttgctagtcaggtcttgaaggctaccaacaaggttagaaaaataatttccaagattaacaccccccgactctcatactccagggaacaaacaatgagattagtgatgtttcaggtgcatattatttcatgcaacatgcaaattgtaatagagaaataa

SEQ ID NO: 37 - DNA, 246 bp, synthetic construct
  misc_feature 1..246: note = K6L
  source 1..246: mol_type = other DNA
atgagtgcaaactgtatgttcaatctggacaatgattacatatattggaaacctattacatatcctaaggcattagtattcataagtcatggagctggtaaacattctggacgttatgacgaactagctgaaaacatatcatcgttaggaattttagtattctcacatgatcatattggacatggaagaagtaatggtgaaaaaatgatgattgatgactttggtacagcacgtggtaactattaa

SEQ ID NO: 38 - DNA, 450 bp, synthetic construct
  misc_feature 1..450: note = K7R
  source 1..450: mol_type = other DNA
atggcgactaaattagattatgaggatgctgttttttactttgtggatgatgataaaatatgtagtcgcgactccatcatcgatctaatagatgaatatattacgtggagaaatcatgttatagtgtttaacaaagatattaccagttgtggaagactgtacaaggaattgatgaagttcgatgatgtcgctatacggtactatggtattgataaaattaatgagattgtcgaagctatgagcgaaggagaccactacatcaattttacaaaagtccatgatcaggaaagtttattcgctaccataggaatatgtgctaaaatcactgaacattggggatacaaaaagatttcagaatctagattccaatcattgggaaacattacagatctgatgaccgacgataatataaacatcttgatactttttctagaaaaaaaattgaattga

SEQ ID NO: 39 - DNA, 1419 bp, synthetic construct
  misc_feature 1..1419: note = M1L
  source 1..1419: mol_type = other DNA
atgatatttgttatagagagtaaattgttgcaaatatacagaaatagaaatagaaatattaatttttatactacaatggacaacattatgtcggccgagtattatctatctctttatgccaaatataatagtaaaaatttagatgtatttaggaatatgctacaagctatcgaaccttctggaaataattatcacattctacatgcgtattgtggaattaaaggactagatgaacgatttgtcgaagaacttcttcatagaggatactctccaaatgagacggatgatgatggaaattatccattgcatatagcttctaaaattaataataatagaatagtcgcgatgctgctgacgcacggcgcagatccaaacgcgtgtgataaacataataaaacacctctatattatctctcgggaacagatgatgaagtcatagagagaataaatttattggtacagtatggagccaagattaacaactcggttgatgaagaaggatgtggtccgttgttggcgtgtacagatccttcagaaagagtgtttaaaaaaataatgtccatcggattcgaagccaggatagtggataaatttggcaaaaatcatattcatagacatcttatgtcagacaatccaaaagcttctacaatctcatggatgatgaaactaggaattagtccctcaaaaccagatcatgatggaaatacacctctccatattgtatgctctaaaacagtcaagaatgtagacattatagatcttttacttccatcaacggatgttaataaacaaaacaaattcggagatagtcctcttacacttcttattaagacattgagcccagcgcatcttattaacaaattgctatcgactagcaatgttattacggatcaaacagttaatatttgtatcttttatgatagagatgatgttctagaaattattaatgataaaggaaagcaatatgattctaccgattttaagatggctgttgaagtgggatccataagatgcgtcaaatatctattagacaatgatataatttgtgaagatgctatgtactacgctgtactatctgaatacgaaacaatggtagactatctattgttcaatcattttagtgtagactctgtagttaacggtcatacatgtatgagcgaatgtgtaagactaaataacccagtcattttatcgaagctgatgttacataatcctacttctgagaccatgtatctaactatgaaagctatagaaaaagataaactagataaatctattattattccgtttatcgcgtactttgtacttatgcatccggacttttgtaaaaatcgtagatactttacttcatataaacgttttgtaactgattatgttcatgaaggagtatcttacgaagtattcgatgattatttttaa

SEQ ID NO: 40 - DNA, 663 bp, synthetic construct
  misc_feature 1..663: note = M2L
  source 1..663: mol_type = other DNA
atggtttacaaattagtcttgctcttttgtatcgcatctctcgggtattcggtagaatacaagaatactatatgtcctcctcgacaagattaccggtattggtactttgccgccgaactcactattggtgtaaattacgacattaattctactattattggtgagtgtcatatgagtgaaagctatatcgacagaaatgctaacatagtgttgactggatacggactagaaataaacatgaccatcatggatacggatcagagatttgtggcagcggctgagggtgttggtaaagataataaactatctgttctgttgtttaccactcagcggctagataaagttcatcataatattagtgtgacaataacatgtatggaaatgaattgtggaaccacaaaatacgatagcgatcttccggaatcaattcataaatcatcatcgtgtgatataactataaatggatcatgtgtgacatgtgttaacttagagactgatccaacaaagattaatccccattacctacaccccaaggataaatatctttatcataattctgagtatggcatgcgtggtagttatggcgtgacatttatagatgaactaaaccagtgccttcttgacataaaagaactaagttatgatatttgttatagagagtaa

SEQ ID NO: 41 - DNA, 354 bp, synthetic construct
  misc_feature 1..354: note = N1L
  source 1..354: mol_type = other DNA
atgaggactctacttattagatatattctttggagaaatgacaacgatcaaacctattataatgatgattttaaaaagcttatgttgttggatgaattggtagatgacggcgatgtatgtacattgattaagaacatgagaatgacgctgtccgacggtccattgctagatagattgaatcaaccagttaataatatagaagacgctaagcgaatgatcgctattagtgccaaagtggctagagacattggtgaacgttcagaaattagatgggaagagtcattcaccatactctttaggatgattgaaacatattttgatgatctaatgattgatctatatggtgaaaaataa

SEQ ID NO: 42 - DNA, 528 bp, synthetic construct
  misc_feature 1..528: note = N2L
  source 1..528: mol_type = other DNA
atgacgtcctctgcaatggataacaatgaacctaaagtactagaaatggtatatgatgctacaattttacccgaaggtagtagcatggatccaaatatcatggattgtataaacagacacatcaatatgtgtatacaacgcacctatagttctagtataattgccattttgaatagattcctaacaatgaacaaggatgaactaaacaatacacagtgtcatataattaaagaatttatgacatacgaacaaatggcgattgaccattatggagaatatgtaaacgctattctatatcaaattcgtaaaagacctaatcaacatcacaccattgatctgtttaaaaaaataaaaagaacccggtatgacacttttaaagtggatcccgtagaattcgtaaaaaaagttatcggatttgtatctatcttgaacaaatataaaccggtttatagttacgtcctgtacgagaacgtcctgtacgatgagttcaaatgtttcattaactacgtggaaactaagtatttctaa

SEQ ID NO: 43 - DNA, 1735 bp, synthetic construct
  misc_feature 1..1735: note = UL 40 expression cassette
  source 1..1735: mol_type = other DNA
cttaaggaagttcctatactttctagagaataggaacttcttacttgtacagctcgtccatgccgagagtgatcccggcggcggtcacgaactccagcaggaccatgtgatcgcgcttctcgttggggtctttgctcagggcggactgggtgctcaggtagtggttgtcgggcagcagcacggggccgtcgccgatgggggtgttctgctggtagtggtcggcgagctgcacgctgccgtcctcgatgttgtggcggatcttgaagttcaccttgatgccgttcttctgcttgtcggccatgatatagacgttgtggctgttgtagttgtactccagcttgtgccccaggatgttgccgtcctccttgaagtcgatgcccttcagctcgatgcggttcaccagggtgtcgccctcgaacttcacctcggcgcgggtcttgtagttgccgtcgtccttgaagaagatggtgcgctcctggacgtagccttcgggcatggcggacttgaagaagtcgtgctgcttcatgtggtcggggtagcggctgaagcactgcacgccgtaggtcagggtggtcacgagggtgggccagggcacgggcagcttgccggtggtgcagatgaacttcagggtcagcttgccgtaggtggcatcgccctcgccctcgccggacacgctgaacttgtggccgtttacgtcgccgtccagctcgaccaggatgggcaccaccccggtgaacagctcctcgcccttgctcaccatttttagagagaactaacacaaccagcaataaaactgaacctactttatcatttttttattcatcatcctcgaagttcctatactttctagagaataggaacttcgcggccgctcaggcctttttcagggcgtagtggtggtcgttaggcagcactcccaggcttctggcgatctgggagtagaagctagaaaagctgccgagggccaggatgcccacggtgtacatagcccaggtttccagtccgaaggtggcaggtctcagcttcaggtgatatgccactctctcgctcagttggctgtgttcgttcagacaacagctttgcaggtgggtcaggccaaaggcgctctcgttcacgccccgcacgtgcacggtctgagcggggcaatcctggtgctgggctctgaaatggtcctggcaagagatgccgtccacgtgtctgcgagtattgttgcccacctcgatcagcagtgtgttgtcggcaggatggtgggagaaggccaccacggtgttgttgcttgtctgccggcagcagtacacgtccagtgtcatcagggccatatctccttggtggtagacggcgtaggcccagccctggaacaccagtgggcacagagggccgtgagcagatgtaacagcggcggtggtcacggttgtctcggcggggctacagagcagggaccggattctcatgcacagcaggccgactgtcagaatcagggttctaggggccatcacggcgcaggtgaagccgattctggtattagagaacttgttcatcccgggtacgatacaaacttaacggatatcgcgataatgaaataatttatgattatttctcgctttcaatttaacacaaccctcaagaacctttgtatttattttcattttttaagtatagaataaagaatctataaaaactaaaaaaattatacatcataaaccaatttcctagttgtttgtaactttaagtcgac

SEQ ID NO: 44 - DNA, 1850 bp, synthetic construct
  misc_feature 1..1850: note = K5 expression cassette
  source 1..1850: mol_type = other DNA
cttaaggaagttcctatactttctagagaataggaacttcttacttgtacagctcgtccatgccgagagtgatcccggcggcggtcacgaactccagcaggaccatgtgatcgcgcttctcgttggggtctttgctcagggcggactgggtgctcaggtagtggttgtcgggcagcagcacggggccgtcgccgatgggggtgttctgctggtagtggtcggcgagctgcacgctgccgtcctcgatgttgtggcggatcttgaagttcaccttgatgccgttcttctgcttgtcggccatgatatagacgttgtggctgttgtagttgtactccagcttgtgccccaggatgttgccgtcctccttgaagtcgatgcccttcagctcgatgcggttcaccagggtgtcgccctcgaacttcacctcggcgcgggtcttgtagttgccgtcgtccttgaagaagatggtgcgctcctggacgtagccttcgggcatggcggacttgaagaagtcgtgctgcttcatgtggtcggggtagcggctgaagcactgcacgccgtaggtcagggtggtcacgagggtgggccagggcacgggcagcttgccggtggtgcagatgaacttcagggtcagcttgccgtaggtggcatcgccctcgccctcgccggacacgctgaacttgtggccgtttacgtcgccgtccagctcgaccaggatgggcaccaccccggtgaacagctcctcgcccttgctcaccatttttagagagaactaacacaaccagcaataaaactgaacctactttatcatttttttattcatcatcctcgaagttcctatactttctagagaataggaacttcgcggccgcactgccgcggtcagccgttgttctttgggtggttcttccgcacaggtttcttggtaggagcgcacaggtcggttctagcggttccgcgcaggccggctctgtcgttagggccgccgtcaggctcgtcgccagagctgccgtcccgttccttatcgccgctggccacgtcgccctcgctgctctcgtcggtgggttcctcatcggttccgccggcagggcccaccagcacggtcagctcgatgttatcttcattagctgtaggccttctaggtctccggtaggggagcacggtcactcttgtgttgttggcggcgtacagggcccgcacggtgccgctgacccggcagatgccgccgaaggcgaacacgatgaagatttggtaaaagccgaagaagcacaggaagcccagcacggcgccggggctgaatgtgccagcaggggctgtcaggatgaccagcagggtccaggtacacagggccactcccaccagtccggcgaccaccacgctcatcagcaggaacagctcgaagatttcctgtctttccatttctggccacaggttcagtctgctccgccactgggttcttgttctatagatcactctgcacatctgacaggcggtgtttctggacacggtcagccatgtagacagacattgagggtgcaccacgtccagctcgccggtgcaggcgcaggggtgaataccctcatttcccacctcttcccggcagatccagcagatggggccctcaacgccctcttccacgtccttggaggccatcccgggtacgatacaaacttaacggatatcgcgataatgaaataatttatgattatttctcgctttcaatttaacacaaccctcaagaacctttgtatttattttcattttttaagtatagaataaagaatctataaaaactaaaaaaattatacatcataaaccaatttcctagttgtttgtaactttaagtcgac

SEQ ID NO: 45 - DNA, 2661 bp, synthetic construct
  misc_feature 1..2661: note = UL40_K5 expression cassette
  source 1..2661: mol_type = other DNA
cttaaggaagttcctatactttctagagaataggaacttcttacttgtacagctcgtccatgccgagagtgatcccggcggcggtcacgaactccagcaggaccatgtgatcgcgcttctcgttggggtctttgctcagggcggactgggtgctcaggtagtggttgtcgggcagcagcacggggccgtcgccgatgggggtgttctgctggtagtggtcggcgagctgcacgctgccgtcctcgatgttgtggcggatcttgaagttcaccttgatgccgttcttctgcttgtcggccatgatatagacgttgtggctgttgtagttgtactccagcttgtgccccaggatgttgccgtcctccttgaagtcgatgcccttcagctcgatgcggttcaccagggtgtcgccctcgaacttcacctcggcgcgggtcttgtagttgccgtcgtccttgaagaagatggtgcgctcctggacgtagccttcgggcatggcggacttgaagaagtcgtgctgcttcatgtggtcggggtagcggctgaagcactgcacgccgtaggtcagggtggtcacgagggtgggccagggcacgggcagcttgccggtggtgcagatgaacttcagggtcagcttgccgtaggtggcatcgccctcgccctcgccggacacgctgaacttgtggccgtttacgtcgccgtccagctcgaccaggatgggcaccaccccggtgaacagctcctcgcccttgctcaccatttttagagagaactaacacaaccagcaataaaactgaacctactttatcatttttttattcatcatcctcgaagttcctatactttctagagaataggaacttcgcggccgctcaggcctttttcagggcgtagtggtggtcgttaggcagcactcccaggcttctggcgatctgggagtagaagctagaaaagctgccgagggccaggatgcccacggtgtacatagcccaggtttccagtccgaaggtggcaggtctcagcttcaggtgatatgccactctctcgctcagttggctgtgttcgttcagacaacagctttgcaggtgggtcaggccaaaggcgctctcgttcacgccccgcacgtgcacggtctgagcggggcaatcctggtgctgggctctgaaatggtcctggcaagagatgccgtccacgtgtctgcgagtattgttgcccacctcgatcagcagtgtgttgtcggcaggatggtgggagaaggccaccacggtgttgttgcttgtctgccggcagcagtacacgtccagtgtcatcagggccatatctccttggtggtagacggcgtaggcccagccctggaacaccagtgggcacagagggccgtgagcagatgtaacagcggcggtggtcacggttgtctcggcggggctacagagcagggaccggattctcatgcacagcaggccgactgtcagaatcagggttctaggggccatcacggcgcaggtgaagccgattctggtattagagaacttgttcattatacgaagttatgtcgagttatgatctacttccttaccgtgcaataaattagaatatattttctacttttacgagaaattaattattgtatttattatttatgggtgaaaaacttactataaaaagcgggtgggtttggaattagtgaccgcggtcagccgttgttctttgggtggttcttccgcacaggtttcttggtaggagcgcacaggtcggttctagcggttccgcgcaggccggctctgtcgttagggccgccgtcaggctcgtcgccagagctgccgtcccgttccttatcgccgctggccacgtcgccctcgctgctctcgtcggtgggttcctcatcggttccgccggcagggcccaccagcacggtcagctcgatgttatcttcattagctgtaggccttctaggtctccggtaggggagcacggtcactcttgtgttgttggcggcgtacagggcccgcacggtgccgctgacccggcagatgccgccgaaggcgaacacgatgaagatttggtaaaagccgaagaagcacaggaagcccagcacggcgccggggctgaatgtgccagcaggggctgtcaggatgaccagcagggtccaggtacacagggccactcccaccagtccggcgaccaccacgctcatcagcaggaacagctcgaagatttcctgtctttccatttctggccacaggttcagtctgctccgccactgggttcttgttctatagatcactctgcacatctgacaggcggtgtttctggacacggtcagccatgtagacagacattgagggtgcaccacgtccagctcgccggtgcaggcgcaggggtgaataccctcatttcccacctcttcccggcagatccagcagatggggccctcaacgccctcttccacgtccttggaggccatcccgggtacgatacaaacttaacggatatcgcgataatgaaataatttatgattatttctcgctttcaatttaacacaaccctcaagaacctttgtatttattttcattttttaagtatagaataaagaatctataaaaactaaaaaaattatacatcataaaccaatttcctagttgtttgtaactttaagtcgac
